United States Patent Application Publication US 2004/0033502 A1 - sequence listing, part 2

SEQ ID NO: 1585 - DNA, 135259 bp, Homo sapiens
  Genbank Accession No. Z83838
gatcctgttgagaggagtaacattctgagactcacagtggaggcagctgtttcagggttattgggcgtggggtgtttctcggagcgcggcagcctgaagtcatcccccgtttccctcctcaggtacaagaagaacttgaaggccctctacgtggtgcaccccaccagcttcatcaaggtcctgtggaacatcttgaagcccctcatcaggtatgcgtcactctgggagaggacctcgctggggttggaggtttcacccctcagggtccatgggacggccttccctatccacgcatcatggagggcccgtctccagggtgcctgtgtatctggggctccctacccgccctggggtctgcggggggtcacaaggccagcccaggtcatggacaggagtgcagtgccggcctttggcacctgtggggtttgcacctggtgtttaaaagcccccctttgcctgagcccccacactgtgtgaccaccctcaggtgccgtgattttccagagggactcacagatgtcaggaaagctgttatcttcactgttgtggtctgttacagagacagggcacagatttaagtcagcaaaggtaaaaggcacacaaggctgagtccaggaggaccaagtgcaagttcccagctgccctctccgggcggattcatacaggcagtgctccattctcccagcaggaatgtgtgggggaggagggagcatggctggccgcggaagctcaccgagccttggtgcccagggtttttgttgcgggtcagtcatgtaggcacggagcatccacccggctgacctcagccactcggtctccagcccctcctgagatgagacaaataaaacccacccaaggcccccgccctcaatcacattgttggcacaaactctgtggtgttggcccaaggttcccggtgggcaaagacattaccaggccgactctcccaggagctgagaggtttccacccaggagcaggtcacccatggccagccttctctttggaacgtgtggggcttggacacccccagcctgctgagttaagccttgattgcatagcaacccaaataagcggcctaaagaaaggcagccacagcccggaaatgtggcgacttcagtcagcttcttccatatttagacttgttcctgctaaaggatttctgcctcagtattgggaagcaagagctcaaggggctcgtgaggcctgggaggctctgcctgggtcgcatgggcatcttgtattttcttccgttttggctgtatgcatcaggcacaaactgtgtgcacagagccacatgacgggggtggggtggggaagagactgacagatgtcgttcttgcacggtggctctggccctccctgggtgagttctgcaggcgagggaggggctcagagcaggagggcgcaggtgtgcaccagacgggtcaggatagccaggtgaggtggctgcctctgtgagagggcgggaggactcctggagggcctccctaggatgaagcctctggggacagggaggcgcatccctggaggggtcgtcattcttccccagaggtttgcatctcacaggcctttgccatctcccccctcggctccttccacttgttgaagcccactcgtggctctgaggctgctgctgacacaggtctcttctcgtgccccacagacaccgtgtgagtgggtgtgacgctccgtgtacagggagcactcagacagagctggaatgccagctgggacctcggaatccacactgtctccttcccatttccccatccatccctgggaagcatctcggccccccaggagcatggacagctcaggctctcaggcacctgcctgtcttcccaccagccgtctcccgccccaagggctacactgccccgtcccacccttgtccctgtgtccctttgtctcttaatgtgactggtactcagaggaatgttggcaagcactggtccttgggcacatcgagagctactctgcagccagacacagtggctcatgctactaatcatagcactttgggaggccaaggcaggaggatcacttgagcccaggagtgtgacctgggcaagaaagtgagccccacctctataaaaaatataaaaattagccggatgtgtagcatgcgcctgtggtcccagctacacgggaggccaaagcaggaggattgcttgagtccaggacttcaaggctgcagtggcttgtgtttgtgccattgcatttcagcctgggcaacaagcaagaccctgtctcaaaaaaaaaaaaaaaaaaaaagaactgccctgccaggcggcttggagcctttcttttctttcttttttctttctttctttcttttttttttttttttttgagacgaagtctcgcttttgtcccccaggctggagtgcaatggcgccatctcggctcactgctacctctgcctcctgggttcaagcgattctcctgcctcagcctcccaagtagctgggattacaggcacctgccaccacgcctggctaatttttgtgtttttagtagagacggggtttcaccatgttggccaggctggtctcaagctcctgacctcaggttgatccacccgcctcggcctcccaaagtcctgggattacaggcgtgagccaccatgcccggccttcttttcttatcagctcccaaagctgtcattccagggactgaatcgtgtggtcctgaggcacactgggagaattcccagagcagcagacttgagtcagctcctgcttaatagaaggagagatttttggggccaaagagctcctttcatgtcactagaatttcctgccagtttttctcacctactggcctatgccgcacacattcccctattggaaggtgaggttttgtttgtgtttaaccaggcccagcacccttgtgccctatgtgacatgtgacatatttgacatagcaaaaaagctagtcctgtcatttaccttagaaaagtccttagaggggctgggcgcaatagctcacgtctgtaatctcagcactttgggaggctgaggctagcggatcacctgaggtaaggagttcaagaccagcctgctcaacatggcaaaaccccgtctctactaaaaacacaaaaaattagcgggtgtggtggtgggcgcgtataatcccagctactcaggaagctgaggcaggagaattgaggcttgaacccacgaggcagaggttgcagtgagtcaagattgcaccattgcactccagtctgggtgacaagagcgaaactccatctcaaaaaacagagaaaagtccttagagggcgaggcatggtggctcacacctgtaatcccaacactttgggaggccaaggcaggtggatcacttgagcccaggagtttaagaccagcctgggtaacatggcggaacctcgcctctacaaaacagataaaaatcagccaggcatggtggcgcgtaccttagtcccagctattcaggaggctgaggtgggaggattgcttgagttcgagaggcagagactgaagtgagctgagatagcaccactgcactccagcctgggcgacagagtcagactttgttgtacttaagagttctagaaacctctaaggttcttggaaaaaaagttcacctgcttggccaggcacagtggctcacgcctgtaatcccagcactttgggaggccgagatgggaggatcacttgaggtcaggagttcgtgacaagcctgaccaacatggtgaaaccccgtctctactaaaaatacaaaaatcagctgggcgtggtggcgcatgactgtaatctcagctacttgggaggctgacgcaggagaatcacttgaatccaggaggcagaggttgcggtgagccgagatcacaccattgcactccagcctgggcaacaagagtgagactccagtctcaaaaaaaaaaaaaattcacctgctcctcctgttttccacgtggcagcgtgatggtgatggcaccagactgcctgggctcgactgctctgccccttgccatccattacccattaccctcaacaaaagagccaacccctctctgcctcagtttccccatgtggctgacaaggctatttaagtcattccattgtcataataattcactgacttaatacatatagtgtttattttatttttcttccttccttccttttctctttttttttcataggttcttgttccatcagcccggctggagtgcagtggtgcaatcatggctcactgcatccttaacctcctgggctcaagtggtcctcccacctcagcctctcacatagccgggattacaggtgcgcaccactgtgcccagctagtttaaaacaattttttgttgagacagggtctcgctatgttgcccaggctggactggaactcctggcctcaagtgatcctcctttctcagcctctcaaagtgttgggattataggagcgcaccatgttgactgtttagaatagggcctgccaggcaaatactcaatgttagctgctagtactgtgttttttgtttgttgttgttttgttttgtttcattgctttgagacaaggtctcagtctgttgcccaggctggagtgcagtggtgccatcacggctcactgtagcctcgaactcctggactcaggtgatcctcccacctcagccttccaagtagttgggactacaggcacgccaccatgcccagctaaattttgaacttttagtagagacagggttttgccatgttacccaggctcctctccaattcctaacctcaagtaatcctccagcctcggcctctcaaagtgctgggattataggcatgagccactgcacctggccctgatttaaaatgtttttaagttggctgggcgtggtggctcacccctgtaatcccagcactttgggaggccaatgtgggcagattacctgaggtcaggagttcgagaccagcctggccaatatggcgaaaccctatctctattaaaaatacaaaaaattagcggggagtggtggcaggcgcctgtaatcccagctactcaggagggtgagctacgagaatcgcttgaacccgggagacggaggttgcagtgagccaagatcgcgccattgcactccagcctgggcaataagagcgaaactccacctcagaaaaaagaaaaaaaaatcttttaaaactacccttttgtattaatttgattccaatatcttacgcaccttatgtgccagcaccgcaaaacagtactgtgaagtcagccacattttccccattccaaagaagaggaggttggtgctcagagaggttacgcccaagtcgcaccatgagagggggcgtgggctgggatccaacctgagcctgtgtggttctacccctcattctgcctcatgcctggacataagcagctgccaggagaggaccataggaattgggctggggctctggagcccagattgggctccgcagcccattgcctgtgagatcttgggcagccacataacctctctgtttcccaagtcctcatttgtaaatgaaggaagtagaggaactctgaggccctgggtctcgccagacctcctgactcagatccccgcaggtggtgcctgtggctgcaggtctaacaaaaccccagcaactctgccgcacgccgtgttgggagcccctggctgagctggcctgtgggccctttcccgagaggagaggcaagtggcagggccctggctgcacctgtcccagagtccgtgtttggcagagcctggcctgcaggacaggtcagggaggttgcagagaggaaggtgaggggctgggcatgggaggcctccctgcagctctgaagcgggcacctctgtccctgagaatggttcctgcagaggggcaagactccctttgcccttagtgggttcctcccgcccatcacacaggacgttgacagtacttcacagccccggggacaccctccggcatccttccagcagagaccagactgtccccgagtcctgtggcgtctaaatgggcaggcggtgaggacactcctgcaggggtcccaccagccccttccctccgggggctggggtgcaggcactaaggcaggccccgctttcctccctccccttgtgcttggggtgaggggcacactgcactttggtggctattctgcagccccagccttcagcccgggttccctggcctacctggcagtgtccttgaatacagaaacctggcaatccccgccctcctccctcagcccccgggtccgattctttctcgtccactagggggagccagtgcacacagctcggcctccctcggggctcctttaggaaccacctggcgctggtgctggcgctggactgagctgtgggctgagctttgggctgagcactgggcggccgctgtccctttggattctcctacctgtcatgatctccgtattttttgtttttgccacggtaacttgaattattttgatttcacaaaataaacgacattgaaaatacatgaatacttatttcaagactttcaaattgtcataaaataacataaaatatcttcggtttggctgaatacataactttccttttccagtaacaacataattctttacccacattaatagttgtatatcttggccaggcacggtggctcatgcctgtaatcccagcactttgggaggccaaggcgggcggatcacgaggtcaggagatcgagaccatcctggctaacatgttgaaaccccgtctctactaaaaatacaaaaattagccaggcgtggtggtgtgcaccttaatcccagctacttgggaggctgaggcaggagaatcacttgaacccaggaggcggagcttgcagtgagccgagatcacaccactgcactccagcctgggtgacagagcgagactccatctcgaaaaaaaaaaagttgtatatcttaaacatatacaataaagaaataatactgtcctccaaaataaaactcaaatgatatatttatggcaaaaaccaaacctagactatcataaagaaggcggggattacaggcttcttataaaggcgtgctcgcatccatctgtcaatgatccccactttgcaattcatgctgagccttgttactaatagcagtcgtcacagcgagcatgtccaccagacgtcaggcagtggactagacctgcaaatagccttgcattgtcttccgccctcacttaggagggagaacccccactttcagacccaggccctgagagggagtgaattgccctggggcacaagaggagggagaagacggagttgctgcacctggtcagggcatgtctggccttgtggctgcgctgctccctggggtccgagagactgtcctggagacaaacctggagagcctcattggttcctctccttagaagaggtggccaaatgtgaagccaccactgaccccaaaaccgcgagcaactgaggctgccctggggcaggcttcaacctcagagctgctctctctgtgccagtggcttagtgccccctgtctagcctgcatcccccaaaagcgcttcttggcacttccgcgctatctcctatatgcaaattcagggcagatgtaaattggaggcagatatttatttttatgcagatgagccactccagcgtgtttggtgcattggagatctcgtgaaagcaaaatatctcccggcgtgcgctgcttgtgttatgttcgggttttaagtcgtgtcagcgtttacattttcttaatatgaaaaatgcctgcattgttctgccgccaactccccctccctccctgcaaccctcggcctctctgctggcgcctaatcgttctttattctcttgcttctgctttcttagtcacaagtttgggaagaaagtcatctatttcaactacctgagtgagctccacgaacaccttaaatacgaccagctggtcatccctcccgaagttttgcggtaagtgcctgttagaccccagaagccgcatcaatacatcttcgtgcttccaaagggcttggttcagtcccatgaatgtttaaggcttgatttccaaatgtgtgcttggctagatttggctcagaaatctgcggcatcgacaaagatccgcagcaaaaggtgctaactgctgactcagagaaatgaaatggcaaaggttgtatacaggacgggatgttttcctcgcccaccattgcaaaactgatttaaaaaataagccctaacatggcaacggccgtttgttgccttggtgtttaccgtttttgcttttgagcagaaaattaggagaatttcccaggcgtgtggataacgctgtgtacagaatgaagtgttctcagggacgtcacgggtgctctagaaaacgacctgtctcctggatgctgaaagcttaattggtgtgtctgctacaaggcttaaatgtaggcccagatgaatagaggctgcccagaaaggcgtatgccacacagccagtacagggcgcggccagatccagcctgggtctctggacccccagcctgggttccctctgcccctgtgtctccctctctgaggcgctcctttgaaggagcaggcccttgccaaagtacgtgcagggaaggctggtagccttgcaggggtaatggagataataacttctctccggacgccaagtcacatggcaggtgctgggatatagaggtgtttagggagtgtggtctctgccctcatgacactctcagactagtgagggccacaaatcagtgatgacaggggccagaggaggcacagaacccagctggggaggggactggtgtgtgggggtaatccaggaagacttctaggaggaggtagctcttaaagtgagtttcacagggacagttggctagatgaagaggccagggaagcacatttccagcagagggaagccctcctgcaaacatatgggtgaaatattgggagatctggaggcagtgagaagtcccatgtgatcaggcagaagttggtgaacgtgaagctggaggtcaccttgggccgggagtccttggtgccaagcagaggagagtgaactggacctggaggccatgagaggatgatgggaatccctggtcgcccgtgggccctggcaagaccccactcccagacctcactaaagtgatccgggggagtccatggagacggctcagaagatgtatttgtagcagctctgtggtggaagtgatttggtctggtgacaaagggtaactcacatcctcctgtgtgggagagtgatttggggatgaaatggacggcatctgtgaaacacgcagctccggcttctcagtgggtactgggtgcagtctagggcctctggaatgtgcaggtggctggcaacactgagggtgcagggtcctgtgagtcagaggggatgaggtttgggagaggggcttgggcttgggcattgggagctcctgaacttactcagtaggcagccggcacccctgttccatagccatgcagcagaaccccagaggacacgtccaatgctgatgcttttaaatgagcagcttctagactgggggtggggctgagtctggattttctccacccccacatacttcctggtgggtgctgcgagcaccagaggctgagacccactggcacagcggcagggcagggccttggggtgctgaatcctggctgtcatcccagcttgtgacctggggcatgtcaccagaccttgacaagcctcagtttcccaatctgtaaagtagacaaaataacccctctacagtaggcccctcatgagggaccgagacatctctggggagccacttggggcgcagagcgctgtgattaactcacaaaaaacaaccgcacgtggtagcagctcacacgtgcttggctggccaggctcagtccagtgcaccaccttctccgcagacctttcctgcattgtcgggtgcctaaccctgcaccatcttgtgtcactgactgcctcactcccgagctgccaactaatggtcatgtgcccccccatcctgtggccgggtccctgctgtatgcacagtgcccggcacatagtagggcttcaatacgtatttgcctgtgttaaggaaggactgttacctgagcacagagggtcttttcttttctttcttcttcttttcttttttttttttttttgagatggagtcttgctctatcgcccaggctggagtgcaatggcgcaatctcggctctctgcaacctccacctcctgggttcaagtgattctcctacctcagcctcccgagtagctgggattacaggtgtgcacaaccatgcccagctaatttttgtattttcagtagagatggggtttcatcatgttggccgggctggtctcaaactcctaacctcaagtgatccacctgcctcggcctcccaaagtgttgggattacaggcgtgagccaccgtgccgagcacagaggttcttttcacccgaaggctttaaccacctccttcagagtttatccatccttttcagagtccatctgttcattcatgggtttcttgtttcattcaacaaatattttaattgagcatctagtaggcagcaagccctttccaggcactggggataaagtaattaacaaaagggacgaggttcctttagcattaccggccagctctcgtcttaaattcagacacttgcgagagctgagggtggtcacgcccaccttggggctgaccgcatggtaagcaggtgaggctgctctgctggccaggggcctcaggagagactggacatttgctggaggttggactactgcctcttatgcgaacagcccacagcaatgggggattgtgactgtgtgtatgtgagtgtgtgtgtgagctggcagtgtggcacgtgcgcccagagggatgagatgcccaggtgtcctgcaggtggggcatccagccccacccagcgcctccgtggctgccagctgcccctgccaggtgagatcccagcctctgttgtgtctacaggtacgatgagaagctccagagcctgcacgagggccggacgccgcctcccaccaagacaccaccgccgcggcccccgctgcccacacagcagtttggcgtcagtctgcaatagtaagtgagccggggatgtgcctgctcctatgccctggagccctgggagctgtggggcgcttctgggtccagaaatattttccccagacgtttgtctccagcagccaagctgaaccctgcaggaaagataaagcctgagctcatcactgaggccgtggctcgctgctcagtgcctggttgggggggcgcgtgctcgctgctcggtgcctggttggggggcgcatgctcgctgctcggtgcctggttggggggcgcgtgctcgctgctcggtgcctggttggggggcgcgtgcttgctgctccgtgcctcgttgggggggcgcgtgctgggtgcctggtcgggggggtgcgtgtcactgctctgtgcctgattggggggaccggcagtgggtagtggatgggggtctctggggttcccgccccagcttccatcactgctgccccctgccctccgggtacacagacacttcccaccaccttcaaggagggcgtggtcatgggatgtgcttaggtgtaggtgtggggtgtgtcgtgctaggaggaagcttccagagccagtgggcagctgcctctcatggtgatgtataggcctgggtccggtagagacggcacgtggtcactctgcatccctgatccccgcatcaccatgcaccttgctaacacccaggctggacacaggcatagagaagacaggcttgtgctgggctcagccgctgagatttaagggtcattgttaccgcagcgtaacctgtccttcctaataccctttatcagccacatgaccttgaactcacctcttctctcagcttgtttccttattcctgttatactacctttttttggggtggcgggaacagagtcttgctctgcttctcaggcaggagtgcagtggcaccatctcagctcactgcaacctccgcctcctgggttcaagctattctcctgccttagcctcctgagtagctgggattacaggcgcacaccaccacgcctggctaatttttttgtatttttagtagagacagggtttggccatgttgcctggctggtctcgaactcctgacctcaagcgatccacccctctcagcctcccaaagtgctgggattgcaggtgtgagccactgcacctggccacccagggtagattttgaaacattttgaaaggttttgagaactgaggaggctctgggcggcatctgggccaggggaggaggtgcatcggtcacctgcccttactgagccatgtgggcaggggcattcctggggttagagggaagtggattcggccctggggacctgcctgtttctttcttggccaagagtggaggagctcagggaggccagggagggaggcagaatcatggcccccgacgaagtccatgccctcattcccagaacctgtgattaggtcaccttacatggcaaaaggggcttggcagaaatgattaagtaaaggatcttgggatgggaggttatcttgggttctctggtgggcccaaagcaatcgccagcgtctttacaagagggaggtaggagggtcagagtcagagaggagatgtggcagcagaagcagaggccggaggggtgcggggccagaagccaaggcactcaggcacctctagaaactgaaaaaggcaaggaatggattcttccctggagcctccaggtggaacacagtcaggtcaacccctttttgactcctgacacctccaggatgtggtgagataatacatttgggtggtggttttttttttttttttttttttttttgagacagtctcgctctgtcccccaggctggagtgcggtggtgtgagctcagctcaccgcaacctccgctccccaggttcaagcaattctcctgcctcagcctcccaagtagctgggattataggcgcccaccgccatgcctggctaatgtttgtatttttagtagaaacggggtttcaccatgttggccaggctggtcttgaactcctgacctcaggtgatccacctgcctcggcctcccaaagtgctaggattacaggtgtgagccacctcgcctggcccatttgtgttgttttaagctaccaagttgacggtagttactgggaccacatgaaaataaagtaggtggtagtgagtggtgggtagttgcgagtatagggggagggaagtgtgtctaaatcttgttcccagagctagcaagtttgcttccagggtgcttgagcccaggagagggccgggcctggagtgcaaatgtgaagttggctgggcatctcgggtgtatcacagctaaagaggactgctggtgccccagcgtcggtccctagaccagcattatctgatggaactctctgtcaggatggacgaggtctgcacggtccagtatggtagccagtgctcgcgtgcggctagtgcagatgctgaattgctaattttatttcattttaactaaattagaatcatcacatgtgacttgactgtcgtactgcactgcacagctctgaccgattcaccctcgccttccctaactaggcgcacacacgaggagttgtacttaagacattttgtaagcactttgccaataaatgagcaagagactatatgttgaaatagaatgttcaccccaaatatatctggaacacacattttactaccaaatagtacttccttttcctttttcagacattgtgagaatttgcgggtgcgaacaactcttgcactcccaccaccccttaggggccgcccaggaatgctgggcggggcaggcacctgcagtgacctcggtcccctcctgggggcactggtgagaactcagcccttgaccaggctcagccagcagaccagaatttttttttttttttttttttttttgagacaattttttttttgaaatggagtctcactctgttgcccaggctggagtgcagtggcaggatctcggctccctgcaacctccgcctcccgggtttaagcaattctcctgcctcagcctcctgattagctgggactataggcgtgcgccaccacacctggctaattttttttgtatttttagtacaggcagggtttcaccatgttggccaggctggtcttgaactcctgatctcaagtgatccacctgcctcggcctcctactgggataacaggcgtcagccagcacacctagcccgggccaggatattccagccatcaggtgaccgttttccccacgttcctgaagccctgtgtctccagcccgttactggggctctgctgggctgatactgcttccatgtgctgtggcacacagggtcccaggggtgggtctttagctgggagattccagccacgcctttctcgtctcttatcttattgtttagagccacttctctcttcttatcatctaacaaaactttaaaaacgaaaaacaaagcccgggtgcggtggctcatgcctgtaatcccaacactttgggaggctgaggtgggtggatcacctgaggtcaggagttcaagaccagcctggccggtatggtgaaaccctatctctactaaaaatacaaaaaaaaaaaaaaaaaaaaaaaaaagttgggcatggtgtcacacacctgtaatcccagctactcgggagcctgaggcaggagaattgcttgaacctgggaggcggaggtttcagtgagccgagattttgccactgcactccagcccaggagacagagcgagactccctctcaaaaaagaaaaaaaaaaaagaaaaagaaaaaacaagcatagctcacagacttcgaaagccgtctacctgagtgaagtgtgggaaaattgttagccatggctgtaggcctctcggctcctagaaggctaccagagataccattagccctgcattctgagcaggtgcctttcagaacgtactgatgcagggctgttggctttaactgtcactttgccatagtccatccctctcccagggccagttgtaactgtaaaagtccggtccttagctgcttttgggacaatgggccacactgcgcgtgcagcttggagagagaatccctgcagttgcctctttaaattaatattttatgtggtttcattgccaatgattataataaaatggcaataaacattttaaaggaagcactagatatgtaatttgtttggactatgaatgaatgaaagtcattaaaattcataactgaatcctattcacaaatgttaatttgccaagttcaaaagcttacagcagaaagctatcaccttagaatgagctaatgaagttaatatattaaagggaagtcaaagattcaagaggtctttgcttgccatccctgaaaaggaaaaatggaaacctgaggcctgtgtgggcacctgggggaggcaggtacagggcagagcttgagatgtccttaggctgggtggggcaggtcatggctgagctctggcattttcttttttttcctctctctctttttttttttttccctgagatggcgtctcactctgtcgcccaggctggagtgcagtggcacgatctctgctcactgcaacctctgcctcctgggttcaagcaattctcctgtctcagcctcccgagtagctgggactgcaggtgcacgctaccaagtccagctaagttttgtatttttagtagagacggggttttgccgtgttggccaggctggtcgcaaagtcctgacctcaggtgatccacccgcctcagcttcccaaagtgctgtgattacaggcgtgagccactgcacccggctgttactgttttttatttttatttttttagacagaatctcgctccatcacctaggctggagtgcagtggcacaatcttggctcactgcaacctctgccttccagttcggatgattctcctgcctcagcctcctgagtagctgggattacaggtgcctgccaccatgcgagctaaattttttttttgcatttttattttttattttcttttatttattttagttttgttttctgagacaaagtcttgctctgtcacccaggctggagtgcaatgacacgatctcggctcactgcaacctccacctcctgggttcaagcgattctcctgtctcaccctcccgagtatgtgtgactacaggtatgtgccaccatgcccaactaatttttttgtatttttaatagagacgaggtttcaccatgttggccaggctggtctcgaactcttgacctcaggtgatccacccatctcggcctcccaaagtgctgggattacaggcgtgagccaccgcgcctggcctgtttttattttttatcgtagccatcctagtaggtgtcaagtgtagttcattatagttttgtttcacatttcactgatgcctaacgctgttgagcatcttttcatgtattatcggccatttgtttaccttctttggaaaaatgtatattcactagatcgtttgcccattttttgtttggaccgtcttttcattgttgtaaagatttgttgatatatgctagaccctaggcccttatcagatgtatggtttgcagatgttttcttccgtcctatgtgttgtctttacaccttttgatggtattttctgaagcataaaagttacattttgatgaagtccaatttatttatttttttcttttgtcgcttgtgcttttggtgttttatctaagaaatcattgccaaattcaaggccgtgacaattcatgcctatgttttcttccaagagttttaccacttaggggttagatttgggtctttgatacattttgagtagatttttctacatgttgtgaggtgaggtctgatttgcttctttgcgtgttgttacagcaccacttgttgaaaagacttttcctggccaggcagggtggctcacgcctataatcccagcactttgggaggctgaggcgggtggatcacctgaggtcaggagttcaagaccagccttaccaacatggtgaaacacccatctctactaataatacaaaaaaatgtgctgggcatggtggcaggcacctgtaatcccagctactccggggactgagacaggagaatcgcttgaacctgggaggcggaggttgcagtgagccaagatcatgccattacactccagcctgggtgacaagagcaaaagtcatctccaaaaaaagaaaagaaaatacttttctttcccccattcagttgtcttggtaccttgtcaaaaaccaataaacatgagggtttatttctgggcactctaattcttgcctattggtctatatgtttatccttatgccagtgccacacaatcttgattactgtagctttgtagtaagttttgaaattgggaagtgtgagtctgtgagtcctccaacttttttttcaatattgtttaggctattctgcatctctttaatttccatattcattttagtatcagctcgttaatttctgtaaaaggcagctgggatttcaatagggcttgtcctgggtgtgtagaccaattttgagggtattgccatcttgaaaatagtagtcttccaatccatgaacatgggatgtctttccatttatttgggtcttttaactttttttcagtggtattttatggttttcactgtaccagttttttgaacttttttgttaaattttttttttttaatttgtgatgctattgtcaatgtaatttttttttttttttttttttaaagacagagtcttgccctgttgcctaggctggagtgcagtggtgcaatcttggcgcactacaacctctgcctcctgggttcaagtgattctcctgcctcagcctcccaagtagctgggactacaggtgtgtgctaccacgcctggctaattttgtatttttggtagagatggtgtttcaccatgttggccaggctggtctcaaactcctgacctctggtgatctgcctgcatcagcctcccaaagtgctcagattataggcatgagccaccacacccggttgtcaatgtaatttttaatctatctttttgttactgattgctaggttctagaaatacattttttaaatatgttgatcttgtatcatgcaaccctactgaacttgtttattagttctaatatttttgtgtgtggattttttagaattttctatatccaggatcatgtcatctgcaaatagagatggctttacttcttccttttcaacctattgccttttattgcctgattatgcctgactgtaacctccaatacattgttgaataaaaatgataagagcagacatggttgtcttactcctgatcttaagaatcagcagttaagctgggctaagcagcatgtacctatattctcagctatttgggagattgaggtgggaggatcacttgaggccgggagttcaagactagcctggacaacatagcaagaccctgtgtctattaaaaacacacacacacacacacacacaaaagaatcaacagtccttcactactaagcataatgttagctgtgtgcatttcatagatgccctttatcaggttaagaaccatcttttttcttttcttttcttttcttttttttttttttttttgagatagagtctccctctgttgcgtaggttggagcacagtggtgcaattatagatcagtgcaacctcagattcctgggctccagtgatcctcctgtctcagcttcccaagtagctggtactataggtatatactaccatgcctggttaatttttaaatgtgtttagtagagacagggtctcactatgttgcccaggctgggaacatcatttctatttctagtttgttgagtggttggttggttggttggttggtttgttcatgtaaaggtgttaggttttgtgaaatgcttttcatcgccattgagataatcacatggcttttgtcctttatactgttgatatggtgtattatattgattgatttttacatgttgaataaaccttgtattcctgggataaatcatttgtgttcatggtgtataatctttttcatatattgctggatttgctttgcttgtattttgttgaggattttgtatttatatttataagaggtattagtttgtcattttcttgtcttatgatatccttgtctggttttggtgatactggcctcagaatgagttgggaagtgtttcctcctcttctattttttggaagaatttgtaccatattagagttaatttgttaaacattttacagaattcaccactgaagccatctgatcttaggctttactttgtgggaagttttaaaattactaatgtaacctctttgcttgttatatttattcagattttatatttcttcttgagtccattttgattgtttgtgtctttccaggaatttgttcatttcgtctaggttttctaattagttggcatgtaattgttcatagtacttcataatccttttatttgtataatgtcactagtaatgtttcctcttccattcctgattttagtaatttgaatcttcaccctttttttcttggtcagtctagctaaaagcttgtcaatttgttgatcttttcaaggagtcaacttttggttttgatgatgttctctgttattttcctattttctatttatttctactccagtctttattattttcttccttctgcctgtgtcagatttagttcattttctttttccagttttttaaggtggaatgtttatcattttagaatcttgctttttgcaatgtaagcatctatggctataaattactaagtcctgcaatagatgtatctgttagtgtattatttccatgattttaattaatcttaaagtattttctaatttatcttgtaatttttttctttgattcattgatttctaggagtctgttgttaaattttcacatatctgtttttgatttttaattttattttattataattagataacttactttgtatgatttaacttctttcagatgtatggaggcttgttatgtggtataacatatggtctagcctggagaatattcaacggacacatgagaagagtgtacattctattattgttgggtggagtgctctataaatgtcaattaagtctacttggtttttagtatttttcagtcttctgtttctctgtcaatttctgcctagttgttctatttattattgaaagtgggggattgaagtctccagtatcattttaaaattatttatttctcccttcaattatgtctgttttggctccacatgtttaggggctgtattgttaggtgcatacatttttatgattcttactttcttatgaatccttgcatgatgataaaaaaaatgtccttccttgccactagtaacaatttttgtgttaaagtctattttgtcggatattaatatagccattatagctctttttagttactgtttgcatggtgtatctttgttcatctctttactttcaacctatttgtgtctttgaatctaaattgtgtctcttgcagacagcatataattaggtcatgtttttccccattccaccttctttattagattatttaatccatttacatttagtgtgattactggagttacatctgccattttgctatttgttttctatatgtcttttttgttcctttatgtcttcattaataccttcttttgtgttaaatacatactttctagtgtactgtttcaattttttgtttcttttgctatatatatatatatatatttaaagtattttctcaattgttgccttagggattagaatttatatcttaatttataaccatctagttctaattaagaaggattgtggagccaggcgtggtggctgaagcctgtagtctcagcactttgggaggccgaggtgggcggatcacgagatcgagacactgagaccatcctggccaacatggtgaaaccccgtctctactaaaagtacaaaaaaaattagccgggcatggttgcaggcgcctataggcccagctactcaggaggctgaggcaggagaatcacttgaaccggggaggcggaggttgcagtgagccaagatcgcgccactgcactccagcatggcaacagagtgagaatcagtctcaagaaaaagaaggattggggacttgcaaactcttcagagaatacaacttttgggtgttgtcttccaccccgtgctaacactccttctttgccactggaagaaacttgatctgatggtgatcttattagcaagcaggaccatgtggcccttttagtttctccttatctcccagagccaaggtgttaactgagccagtgttcacttttgtcagaaaagaactggtaagtatctgtctttctagtctcttttttcctgtgtgcgtaggatatgctcttcttcggtctcctgtaccatgtggctgtctggagactatacaatccttctctttgcgatcggcctccagggtgggacactggcctcccataggctctggttctgagccgtgtgtgccaatctgacttgccagaacctctaccccattagagttttggggactgacctcactaaggataccaagcagtttctcattccccatctgcctgcaaagaggggcagccctgcagatgtgagactacaggattccagtgccttgttgccacctttcacctcacgacagctccacctcataccaaatcacaactctaaatgcaagactgtgatctgtaccttttttttttctttctttcttttgagacagggtctcactatgttgctcaggttggtttcaaactcctggggccaactaatgttcctgcctcagcctcctgagtagctgggattacaggtgtattgtcacactgcttgtcttttgaacccaggtataatgaggactttgaagtcagattttaacttgaaccctggctctagtcaaccctaggctgtgtgactccagacataataatttgcctgagcctcagttttgtcctctataaaaatgggggcacagtgatgcagtgagtgggctttagtattgcacgtggtgcacagtaggtcctcagtacacagtaggtcctcagtgcacagtggtcactgtgatcgttcacatgcactgcccatttctctgggcatccaggacctccctggctgactctgtgactgagaactttgcaggtcagtggtgcaagctgcagccattcatcccctttcaaatattgggaggggacgtgttgtatttagaagatgcaggaccatctcagagggttgggaaaagcctgggtgcccagctgaggcaggcctgctcagcactccccattatcactgtaatttcaggttgccattcctccctcccccttccctcctgtttctttctttcttgttttgttttgtttgtttgttttgaggcagaggctcactctgtcacccaggttggagtgcagtggcacgatctcgatctcgtctcagtgcaacatccacctccctgtttcaagcaattctcctgccccagcctcctgagtagctgggactacaggcgcgtgccaccgtacctggctaatttttgtatttttggtagaaacggggtttcaccatgttggctaggctggtctcgaattcccgacctcaggtgatccgcccaccttggcctcccaaagtgctgggattacaggcgtgagccactgcacccagcccctactgtttttaattagtcacaatttctccttatttgtgcattcctcgcatgcaaaaccagagaaaaaacatgctctgaattactctaagcacatctcccgaggggaggggtacaagcaagaattctatgctgagagtccccgatgccctccagtgggtggacgactgtcggaaagccaggtgggagtcactggccacagagaacgctgtgctgaccaacaaactgtgctctgtgctccagagtcctcctgcccagcatgcatcttggaactttagttcatggtgtgggtttaatgcagtttgtgcatccttgctgagacgtgaccctggcccgtgcacattgagatgcacgagatgaacgtggtgtgatacgattcaccggcgccctgggcatccccacccagccaggaaacacagcacatctgccaaccagagtcccctggggtcattgctatgcacagcactgactctgtcagtccattgaacaagcctctctctccgagccagcaagtagcggatgggcaggggaggagaaacccaaattgtgggtttctgctctatggagagtagtaattcgatgccggggccctgttcttccgctagctgtgagagcctcagagtagatgtgggtgctcctcaaatgcacgggcagtggaaaacccgcttggctgggagcacggcagctctgggccagtccctcctctttggggacctcagttttctcatctgcctgaggaggttgggctggatgatctcagagtctcttcctgctctgagagtcttttattttattatttatttattttgagatggagtcttgctctgtctcctaggctggagtgcagtggcacagtctcagctcgctgcagcctccacctcccgggttcaaatgattcttctgcctcagcatcccaagtagctgagattacaggagtgcgccaccatgcctggctaattttttttttttttgaagacggagtcttgctctgttgcccaggctggaatgtgatggcacgatcttggctcactgcaacctccgcctcccgggttcaagcaattctcctgcctcaacctcctaagtagctgggattacaggcacgtgccaccacacctggctaatttttgcatttttagtagagacagggtttcaccatgttggtcaggctggtctcgaactcctgacctcgtgatctgcccatgtctgcctcccaaagtgctgggactacaggcgtgagccaccgtacccggccttaatttttgcatttggtagtagaaacagggtttctccatattgcccaggctggtccggaattcctgacctcaagtgatccacccaccccggcctcccaaagtgctaggattataggcgtgagccaccatgccccatctgagagtctacttttaaaggacagcacagagacaaagcagtaggcaaaggggtctttcaggaactcgtcctcataactccacattgtcccgcctgttgagtaggactcagtgggtctccctccccgggaacagtagccagccagggctttggaatcaatggatgcaggctctccagctgcgtgaacccggataagtcactgtagctcactgggcccatttgttcatctgtgacatggaccacctgtgtgcagcctgggaggctgctcagcccctggcattgggacaattttcgtcagtgccattggcttgtagctcagcaaagcctgcacctcccttgttgtttaatatttgcagaccttggggagagagcgccagcatctctgctttccaaatggagaaactgaagctggagaggataaggaaactggccggtggtgatctagctcctacgggaagggagggacagggtttgaaagggtctgtctggcttcctaaggaaccagagaggaggaaaagagcctgtaactttggcacatcctgggagaaaaggacctgcctgccacattcctccctccccagggacactgtctctgtgggccccaggacgccttctccctcccagagaggaaaccaagatgggaaggaggcagggggccaggtccgtattcctgcaacagcaggacctcctgaaggtcacgccagccctcagggcacctcggggagctgtggattgctgctcagtgtccccaacgtgaagcttcagcaaaagcaaaattgccatgaaaccaaaccacccatcgagattggatatgcagaagccttatggctgtggacagagttctaatcaccgtttaagtggattagcagattcctctgtaaatcttggaataaaactaaagcacactcgataccatgtgcacctgataaatcatctgacatagagacgttcccagggggccgtggagcccagcaggaggagcagagatggaaacccaggccgggcttgcctccctgtgccacctctcaattgtgggaccttgagctggtcacctggcctctcctagtgtcgtcctctgatctctaacttgggctcatgaaacgatggtggaaatgaggcagacgatacacacgtggaggaaagacttcacactcagcccggtgggtttcattcgggcccttttcatcatgaccgagtcttccgttacctgttaccacttcacagattctccaggacttagtggtttccgacagcaaccacgtcacacttctcctggtgtttgtggaatttgagcagaactcggccaggcgagtttgcccatggggcgttggcagagggcacgtggtggtgtccagctggtggctggctaggatcatccaagacatgccttatgttcctgcacctctggcctcagtggggactgttggccagtgcacctgcccgcagtgtccccagcctgatgttcccacggtagctgtgcttcttccagggcagctcagggtttccagcaaaaaggttcccgagatcacaggtgggaagagtcaggctctttaggacaggagagaaggacctggcccagaaactgaacagttgcttctgtcaaattctgttgatccacacagggtccttggggacctgtggctgctgtcacagtggcttaaagtaacacatatttattttcttgcgattctggaggtcacaagtcctgaaatcaggatctcggcagggctgcattttttctggaggttctggggggtatctgtttctcttctagtttccagaggcgcctatgctccttggctcccagccctccctcccatctttttcacagcacaccactctggcccagcttcccttgttacatcccctctcccttctgctcactagatcctctgcaagggtctttgtgatcctgtccggtatcttagtctattccggttgctatgacaaagtaccataaacagagtggtttataaacaacggaaatttacttctcatagagctggaggctctatgagtctaagatcaaggtgccaccagattcgggcaagtaactgtagctcgctgggcccgtttgttcagctgtgacgtggaccgcctctgtgtggcctggttggaatgatttttgtcagtgccgttggctcacagctcaacgaagccggcacatcccttttcgtgatgaggattcggtgtaggatgaggacctgcttcctggttcatagatggtgcctcccggccgcgtcctcgcgtggagaaaggggaagctccctggggtcgcttttaaaagagcactctgtctgcctggagtgtctgaggtgagccaggcctttggggaggtctggctgggaaggggcttgtggccggataagcgcctcactgagtacctggtgagtacctgccgtgccaggcactgccagctccatggccccaaaacttggctctgcaggcctcatacatgcagggctgcctttcaggggagtcccgtttacatttattggccccatagagagcaaggaggaagcgtgtgtgcctgcctggcagggtggaatctgccgtggccctcgtagggaacgggggagggaagatgccaagcactgatccaagtcaacgttaagattcaggtacgcgtcatggccaagaatctgagtaaagtttccatgtattttttcttttttagaattgttaagtctctgtgcgagcgtgatttgccgattgtactgtaacaagtcacatagactgcatgttttctgcgtgctggggtccattctcatttaattctcacccgcctgcccaccctgggaggcaggtgctagtatcccgcccatgtgacaggagaggaagtagaagcagaggtgtcgagtagctctcacgcctgctccctgccttccaagtgcactcctagctccacgtggccaaatccaacttcctttttggggtatccctaaaatgcctcctctgcggtaccggactgcgctcagggtatctctcttcctgtgcacaccagtcagcttttgctaattatgctgcataacagtctcactgggctgcaacatgtttctttctcgctaaggttgggaggtagacaggccagcaggggctcggcccacctccatgtacctgcattttggtaccgggctgaagaagtagcctcttgacatgccattctcagggtggggactggaataagagtggccacgccaaactacgctgtctccttggacgtggtatatgttgtgtctgctcacgtcccacagcagggcacatggcccagcccagagtcagtggggcagggaggtgactgccctccaggaaatgaaggtgacacagagaggaaggggacgcttgttgacggcaccacagtctactcccgtgtggctcctgatcagcaccaggtgcggggagcactgccaaaatctgcttctcatcctcccccaagtatgtactgtttgctgggtctcaggccctgtgttggacacttgatttgaagggttaaaaccaggcacaggcttagcgcagtggctcatgcctataatcccagcactttgggaggctggggcgggcggatcacatggtcaagagatagagatcatcctggccaacatggtgaaaccccgtctctactaaaaatacaaaaattagctgggcatggtggtgcgtgcctgtagtcccagctactcgggaggctgaggcaggagaattgcttcaactcaggaggtggaggttgcagtgagcagagattgcgccactgcactccagcctgggggacagagcgagactccatctcaaaacaaacaaacaaacaaacaaaaacagcacaggtcttgcatacacatccccagtcatttccttgggatgaattcctagacatagattcactggatcaaacagtgtgactgtttgtaaggtttttggttgtcgtggaatcaccctccagaaaggtcacgtgctttgtagagcctgaagccgggggtcacaggcagacctcagtggctcaggcaggtggggctggtggcgagaggaaagtccctcatcctaacactcactcacgtgcaatgtgcaaacatagctgatgcgtcagctggaggtgagggccagctggcactggcaggcaggagcccagcctggcttccttgggggccaccaggggtgacatagaccctcagagccagggctgagcatcaggaggttggcagggcctgggggacgccaggagctctcttgcaacaagagagaaaagcagcatcttagagttgtctcagtgcaaaggctcacatcacagtcagccccagcaaggccagggagacccagtcgaatactttgaccccaggtgggcctgtgtttgtctttgtgtgtgtccagcattgtgttctgttttgatgagaatgtatgccatgggctacgttttcattttcatcttggtgaaggtttacgttgttgatgacctgtggactctaaggatcagggagaggaccctgcatccagaggtgggcagttggaatgtaaacccctcacgaggccagctgtggacaggcacggaagcctttctctctctggaccccttttccttatccatgaagtgggtaacagtagcctgccttgcccaccacattatttccagtgaaacaatgcattttgcaagcggtaaagctgtgtatttcagaaataaatgcccagtaaaaactctttcagataaaccaaagctgagagaatgtattttcagcagaactacactataagaaatgttaagggaagctctgcagaacaaagaaatagaatgccaaatagaaattgggatcctcacaaaggaatgaagcatgctgaaaatggcaaatatgtgtaaatagaaaataaatagattttctcatttttaagaatatctttgaaagtagattgactgtttaaataaaaataataaagtagtatgaggcttaaaacatgttagagtactggataatgtattatattataaagacaggcctggcccagtggctcatgcctgtaatcccaggactttgggaggccaaggcaggtggattgcttgagctcaggagttcaagaccagcctggacaacatgacaaaaccctgtctctacaaaaaattaactggcatggcatggtggcacatgcctgtagccccagctacttgggaggctaaggtgaaagtattgcttgagcccaggaggtcaaggctgcagctagccaagatcacaccgctgtactccaacctgggcaacagggtaagaccttgtctcaaaaaaaaaaaaaaaaaaaaggatgggatatgagacttatactataagtagaatggtataatatcatttgaaatagactgtattacattaaatatgtataatgtaaaactagggtcactacaaataaaaagatacagcatatatacatagagagaagagggagagagttgaagtcttgctctgtcatccacacttggagtgcagtggtgcgatcttggctccctgcaacttccgcctcctgggttcaagtgattctcctgcctcagcctccagagtagctgggattacaggcatgcatcaccacgcctggctaatttttgcatttttagtagagacggggtttcaccatgttggccaggctaggcttgaactcctgacctcgtggtctgtccactttggcctcccaaagtgctggaattacaggcgtgagctactgtgcccggccacatctaatatattaatagagggataaaatgaagtcctaaaaaataattagccagcaaaataaagtcaagaaaagaggaaaaaggaacagataacaaatagtagattcaaacctagccatattgataattacattaagtctaagtggcctaaacattccaattaaaagacagagattctcagattggattttattttattttattttttttgagatggagtctccctctatcacccaggctggagtgcagtggcacaatctcagctcactgcaacctccacctcatgggttcaagtgagtcccctgcctcagcctggagagtagctgagattacaggtgtacacgatcacatccagctaatttttgtatttttagtagagacagggtttcaccatgttggcaaggctactcttgaactcctgggctcaagtgatccgcctgccttggcctcccaaactgctgggattacaggtgtgtgccaccgcacctggccaacatttctttatgtgaatctctgtctcaaaatagtaaagtaagagacaggttaacccagataacatactgagttttttaattgaatcaatatccagtccagggcttcttattctgccctcacagccaagccatctcataccactgggacttcccagtatggcttccctgtctagaatgcccttctctcttttgtcctctggcaggctcctactcatccctcaaaacccagctctgaagttgccccctggggaagccctccccaaaccccatgtcttccctgtatcataaatatccctttcatggagttctcaaatactgcactatcattttattatttggtcttcagactttctacttcctgagggctgagcctacctctctcttcctggacagtgcctgggtcctgtgttttcacaggggtgtggagaggaccagcgcctcttctcattgtgatcacccatcaagctcaggtaaaaactgcgactttcttttctgttttctcagcctcaaagacaaaaatcaaggcgaactcatcccccctgtgctgaggttcacagtgacgtacctgagagagaaaggtgagacggggccggctccagctggatgacgtgagggctgctgggtgcacctctctgggtggtttgtcttggatcctgagcacccacaagccagggggtgtgaccaggaagggaggggctcaagcacagtggctccaggtctgggctctggcctcggatggtctgggtttgaatcctgtctcccctgtgtactagctgtgtgacctggggcagttaccctctctgggcctccattcccttgtctgtccagtggggttaataacaaaccgtacatgacttgtaggattgttgtaacccctaaacgagacagtgcctgcaaagcacttcgggcagtgctggtctgtaggaagccctctcgaaatggggactcctctgatgggatcaactttgatttgcagataccattgccagtagggtgggtgcagtcaagaacttggagtggggtgagccttgtgggctctccacagctcctgaggctagaactgaggtccatggagaaggtgcgtggaggctgcttttaccttaatgggaggaaagaggttcccacggaggagcaggcaccagggaggctttcctggcaccacagctgcaggtgtgctaggtgggccgggtggtctccagcctgggtgctgcagcgcagatgcgtgggtgtcagacaagaagtgagtgcccccccccatccccaccaccaaggcagggctggctcctctccagcctccagagctcggctcaacagttgcttcctcagggaatccccctaacatggccagaccccctaaagcagaccccagctctgcccacggactcagcaccgtgggccccgagaccccgccaccgtgtggtcccttggctgctgccgtttctcacatttccatctggcggggagttcccatgcaatagctcttaaagccaccgcctcagccctgcacctttctggttacgagtgggttgatttcctctttggagcaggccaggtgggtggtcttggaaaaacctgctttagacaggcggggcctggagagcccctcctcacttgtaggccagggtgcccaggaaatgtgctttggcacgagagtccatgcacatgggggtggcatcagtgagcagatgtgctgggcgggggcctgggagaccatctccctcaaaccccagaccctgcggccccagcatttccctcagtcacgatgctcagctggcaggtgagcaggtacggggggcaccccacactgggaccccaagaggcctgcctgtccccggcctggactgcccctccttgccctctaccggttaggtcctgctttccggaagccctctccaattctgcccctctcccaggcagaactgccttcttcacgcctccccatcattcactcattcacttgggaggcattcgctacgtgcctccctcgtgccagactctggggatatcaaagtgagcacacgggatggggaagcagcagctattccaccgagagctgcccagatgctgacttccatcagggagaaggccctgccagaccggggtccctgttaggggggttgaccttgttggggggcttccctgagggaggggcagtggagctgagctctgaggacggggagaagctggccatgccgtgtgacagaaaggccccagagaggagagcaggtgaaggggctcgtggctgtgggagtgcgggagcgtgcggggcttcgaggaagttgggaggagaaggggaggtcaggccttgcaagtcccaagaagacttgcacctccagatgcctgcgccacagtcctaggtcctggtgttccggggcacccccatcatgcaccgcaggccccccaagggcaggctcaggcctgtttctctttctggctctgaagccagcaggggcctggccagagggagcccttccctctaccccacagctgctttcatgagccaattacaagcactgaaaatgctctttataaactgacaatggagacaagttttcttctttgattacaatcacctctttagcagaattgcccaactgaacttggacatcatctatatcttcactgtctaaacagcagccaccagcccctgtggcagtagctcaatagggcagttcatatgaggctcatgcaattgagtgactagatttctaattttatttaattttaattaaagttaaatccccatgtgcagctactggctgctgtgctggacagctcagccctagctcttgtgggaagtcacgtgtctggacgtctcccaggtgccaggcacttgctgggcatcaccgtgtccagtcctctctgcagcccttggagacaggagctcatggccttattctgtagataaacaaggcagataggctcagagaggccgagagctttctctgaggtcacacagctggtaggcagagctggactagagcctaggtctgtctgagattagagtctatttccgctttccctttccatggaccacagaggtgggaaatcgggtgggttggggaatatggaaaggatttgaggaacaaataaatgtgtggaggccagccacaggtgggtgatgccgtgggcaggggagtgtcatataatgtcctggaagccctttgggctgggacctgtgagatgcctggaagctcctctcctgcaggcctgcgcaccgagggcctgttccggagatccgccagcgtgcagaccgtccgcgagatccagaggctctacaaccaaggtgagggtgtcccgcagtcctgagccccgagctgcctggtcagcgagcacagcgctccggggcctcagagcggaggcagggaagcaccgcccccgcaacccacccaactcccagaaaacactcagggtgggggcagcttcccaggaggcatcgaggggcccactggtagtccagagtggggaccttttgtccagacccccaaccccactgggacatggtggccgcatgatgccattttgcctttagggtctctccatccacaccacgtggcacgtgctttcaggagacaccctgcagtgcagggaagctggttttttttatctggcagctcccccgaattggctcagcacggcttccttaactgccatgtgtaacccgcaggcaggggcagtggcctctgagctgaggatgcattgcactgacgctaatgaaggcgctgtcttgctgacaagacttgccctcgctcccactcgctcccgtcatcagttgtgcattacacaatcatggagcatcaggtctgcacggggcccagctcaggcctgcctgtctcaggcccagggcctgcggtgtcatctctgccacagacctggcctcagagagctggcattgtagccgggagcaacagcatgccacagagaagccagcagcccaccccagtccccactgggagcccgggaggaggcagttagggtagtgtaggggctgatggggccagagcacacccatttctaggtggggacagcatcatccctaggacacatggctccagcatcaggtgcgtcccatccggacatctcacgccctgtgtctcagagctcgttctgcagcggcagtgcccaggccggggtgcagacctcagcagtgctgtgttgtgtgtgcagggaagcccgtgaactttgacgactacggggacattcacatccctgccgtgatcctgaagaccttcctgcgagagctgccccagccgcttctgaccttccaggcctacgagcagattctcgggatcacctgtgcgtagctgccctggcgcaggggtggggggcttggtcctcagatgctgtcccccagctactggcccagggtcaggctctggggtggccgaggtgacgtgtacccaccctcctcctgttgccatctggcactgcagggcaagagagggggttgttggggctgcccccaccatgcacagccagtccacactgtccaaaggcagaggaggtggggtcggtcagggttgtccaggccggtctctcaggcacagctgggccaggaggcagggtgatggggggctctctagatttggggctcatcatcctggtcaaagtcctgcctgtaaccgctcccaggccccagaccctcagctctctcatctagaaagggctctcggcatttctccccagatcattgtaggatgccaagcatatatcacaggaactgagcagctatagtgtctgatcctacaggcgctttgtgatgggtcaaatgctcagtgtggctgagcacagatgactcgtaaaaaactccgtaacagcatctcaaaacactggtgaatgctaaggaaagtgatgcctcgaaagaaccataaaacccctcaggccttcatctaagtcatcgaacaccgtcttttcaaatgggactacctccagcgccctcctttcttcttggagcactaacagtcgaaggggggagctgattttggtgtgaattctgaagcagctcggttaagatatcgtaaagacaaatcttgaatcttaaaatcaatgtttctaccccactgtgtattcaagaatcacatttgcccaaagggcagcctggcctttgtcctggcccctggggggtgacttctgaaccttgcactttcccaaggggcaggagttacctttgtcactcatcaggggccctgatggtttatggtaactcatggttatggtgtgactcaagataggggtgtaggggtggccattccagaaagaccaattacatggttagagggtgcgggctttgagtgatgtgagaccagcctgacctctggggagggcatggggctggagactgatttcagtctcaaggcgtcctgtcaaggtcgctggaccccaaactcccctcaaaggcaaatttacacccatttactcagcagtgctcctaagcgcctgccaaatgcaacgccctttctgagatggggaaggtctctcctacaccctggaagaccatgaaagatgttgagggctgactgactttggctagtggatgggaagcctgggagagttcagagccaggctgagcctcatggagacaaatttgatcatgcgcatagaggtacctatctggtggagacagaaggaggcactacattcagcagcatcctaccagccggggccagagcaggcaagatggacaatgctccatcacctgaatgcgccaggctgtgtcctagagagaagcttccagaagcctcccaacttcattagcccctgcagagggatgatgactccagcctctgtaggttcctgcttgagaaaactcaatgctgccaggcgaacttactgtttgttccagccaaaacctggtgacagggagataggccctggaacccctctttgagcagcagttcctttagaaagcttgcaattgtgggccaggcatggtggctcacacctgtaatcccagcactttgagaggctgagttgggtggatcacttgtcataggagttcaagaccagcctggtcaacatggcaaaaccctgtctctactaaaatacaaaaattagccaagcgtggtggtgcacgcctgtaatcccagctactcaggaggctgaggcaggagaatgacttgaacccaggaggcagaggttgtagtgagccaggatcgtgccattgcactgcagcctaggtgacagaacaagactccatctcaaaaaaaaaaaaaaaaaaagcttgcaattatgaatcctttatctgtcctttgagatgaaaatcatctaccacccagagctatgtcaaggacctgagagccatctctttgaaatgaaaacattcaaagtgctacctctgcctcccagtccccggggagggaaggacccagctctggcttgcaccactgcctccggtcataaagataccagacatttgtccacttccggataggcaccaattaacaaacctggagagcgtagtcatattaagcaaccctctgttgggaaggaaaaaatcctttcctgctacccgtcttaggttcattggtgggaaccctgtaacttgttattctgacaaaagacagattcacacgagaaaagcatgccagtttatttaatgtaagttttacatgacacaggagccttttaaatatttatttatttatttatttatttatttaatttttgagacagtgtctcgctctgtcgcccaggctggagtgccgtggcataatctcggcacactgcaacctccacctgacatgggaacctttatgaaaatgaagaaaatgaagacccaggctgggcatggtggctcatgcctgtaatcccagcactttgggaggccaaggcagaaagatcacttgagtccaagagtttgagtccaagagtttgagtccagcctgggaaacatagtgagaccccatctctacaaaagattttaaaaattggctgggcttggtagtgtatgcctgtagtcccagctgctcaggaggctgaggtgggagatcacctgagcctgggagttggaggctacagtgagccatgatcacaccactgtactccagcctggacaaaagagcaagaccatgtccccaaaacagaaggaatgatggagggagggagggaggaaagcaagcaagaaagaaaagaaataaagaaaatgggccgggtgcagtggctcactcctgtaaactcagcacttcgggaagccaaggtgggtggatcacctgaggtcaggagtttgagatcagcctggccaacatggtgaaaccccgtctccactaaaaatacaaaaattagctgggcgtggtggtggacacctgtaatcctagctactcaggaggctgaggcacgagaactgctttgaacccaggaggcagaggttgtagtgagccgagatcgcactgctgcactccagcctgggcgacagagtgagactttgtcaaaaaaaaaaaaaaaaaaaaaaaaaaaaggaagggaggaaggaaggtgaaggaaggtgaagacatggttcagcccgaatgttttgatactaggtttggtgaagagtggaaagtcatggagcttcaattccttttgtcattccgccgtctttagagataaggcaccctctggacatagggaagaccccctcccattagaaggttttatgatctgctacacagaagtagggggagtcagagagagcccttcccacacctgcctttcttagattccttcagctcaataacatattcagcatgcccaggctccatatttgggacagtagtgttccggaccccagcattcccccatctggaactttccccaggaagttttacagtccagaaactgagttggtagattgtctcatgttgcatgaatccttctctcagtgctgtgactaggtcactccagggaaagagttgtgtctcaattcaggaggtagcggtggaggtgggagtagggtgactacctaagtcagcctgttaataaggggcctttctttgtcaacaaacatgaagttcagtggtttgaacaaaccataagttccggggattttttttattttgttttttgtttgtttgttttgtttttgaggtgaagtctcactctcactcaggctggagtgcagtggcacgatctcggctcagtgcaacctccacctcccaggttcaagcctttctcctgccccagcctgccgagtagctgggacgacaggcccgtgtcaccacgcctggctaattttttgtatttttagtagagacagcatttcactgtgtcagccaggatggtctcaatctcctgaccttgtgatccgcccacctcagcctcccaaagtgctgggattacaggcatgagccaccgtgtccggcctaaactccatttttttagtcaggagaacatttagttgagaagattcctagatgttggcttgaagtatcctttcatggtagagagagagtggcagcagctggccagtgaattccatagtttgcaatttagatgtctttggtgatggcactgggtgttccggtgaactttctgagcagactgagtaggaggcacaaggactatccgtacatcatctgctgtgatttctctgaagtttatatcaagtcttccagcgtcagcttttggggctttggggaaatggcaggttttagttctttgtcatgccaactcagggggtaggagaaaactggaaatgttagcttggagcgtcgtagccagatattggaggaaaggagaggaactgagaacccgcaagcgtgcgccgtagttttccacgggagcatcatttctctgtaccgttgcttctctcttgattctcagttacaaaataagtctggtttcattagaatttggcctgattatttacataagggcagcaagaatgggaattgacctatgtcggctctttttaagtctaccttgctagaacttttaataaggaatctcagattcactttttaaaagcctcttgaggctagaaagccaagttaaaaatttgccatcagggccagctgcggtggttcacgcctgtaatcctagcactttgggagaccaaggcgggtggatcacctgaggttgggagtttgagaccagtctgaccaacatggagaaatcccatctctactaaaaatacagaattagccaggcatggtggcatgcacctgtaatcccagctactcgggaggctgaggcaggaggatcgcttgaacccgggaggcagaggttgcagtgagctgagatctcaccattgcactccagcctgggacacagcgagactctgtctcaaaaaaaaaaaaaaaaaaaaaaaaaaaaaaaaaaaaaaccatcagactttgcctgcagtatctgtagatttgagagaattcctctcttctcaaggttctcaatatattttaagtttcctgggcctgccaggaagcggccttgcttactcactgtaacgtcatacataacactgaataaggctagttgtcatttcaaggaattccccttgtatctttttttttttttttttgagacggagtcttgctttgttgcccaggttggagtgcagtggcctgatcttggctcattacaacttctgcctcctgggctcaagtgatccatctgcctcagcctccggagtagctgggattacaggtgtgcgccgccacacccagctaattgtatttttagtagagacgggcttcaccatgttgcccaggctagtcttgaactcctgacctcaaatgatccacccacctcaacctcctaaagtgctgggattataggcatgagccaccatgccaggcccttgttatgcatttttaaccctacttcactagtaagcccaactacataaagatgtatgcttggattatacttaatatgggtaactcagaagatgcagctggtttttttgttttgtttttgtgttgagatggagtctcgctctgttgcccaggctggagtgcaatggcaccatctcagctcactgcaacctctggctcctgggttcaagcaattctcccacctcagcctcccgagtagctgggattacaggcaccggccatcttgcctggctgatttttgtattgttgtagagacggggtttcaccatgttgccatgttggccaggcttgtcttgagctcctgacctcaggtgatctgcccgccttggcctcccgaagtgctgggattacaggcgtgagccaccgtgcccaacctatacagctgtttttaataaactaacaatatcagactaatcttgtcagagttactcaagtcacaagaacttgaaaagaatgtttggcttagtttctatatttctgagagctttagaaatgttttatataaatgctcatgtatctctaagccaatttgaatagaactcctttaagggattttataaattaacttggtaataccatcagagggagaataatttcacgtatacataacatacatgcgtagacataacatagatctgcaaagaaaaaaagaatttttttttaagacagggtctccttctccttgacctctgggctcaagcaatcctcccacctcagcctcccaagtagctgaggcatgcactaccacacccagctaatttttaaatatttttttgtaaagacagggtctcaccatgttgcccaggctggtttcaaactcctgggctcaagtgatctccccacctcagcctcccaaagtgctgggatgacaggcatgagccactatgcctggccacaaaccaagatcttataactttcatacatagtttcatacaagttaagattacctgttgagggtgaaagttgttatcagtatttcaggagaaggccctaaagatttttttctttggccagtttgtttccaaatagtccttttaaccttgttttttgttttgttttgttttgttgtttttaaccaaaggtgtacctaatccaatgtaactcgaaacccataagactttttgtggccatggatacaagagatgttctcagagtcccccaggatccaaagttaccccacagatagccaaaagaaagacaagcgccctcagagctggtgatggctggtaggatgtcagctgtcgccgagtctgtgttgctatgaagaaatacctgaggctgggtaatttataaagaagtttaattggctcatgtttctgtaggctttataggaagcacggtgttggcatctgcttggcttccagggaggcctcaggaagctttcaattatgacggagggcaaaggaggagcaggtgtctcacgcagtgcgagtgggagcaagatggggtgaggtcatgccacacacttaaccagatctcttgagaaatcactcactctcatgagaacagcaccaaagagatggtgctaaccatttatgagaaatctgtccccatgatttaatcacccgtcacccatccccacctcccacattggggattacatttcaatgtgaggtttacaggcaacatcatccaacatatcagagtgcagctcacattactgtctggccagctataaattccctttttttttttttttttttttttttttttttttttgagacaaagtctcactctgttgcccaggccagagtgcagtggctgagattctctactcactacaacctctgcctcccgggttcaagtgattgtcctgcctcaggctcccaagtatctgggattacaggcacccgccaccacgcctggctaatttttgtatttttagtagagacggggtttcaccgtgttggccaggctggtcttgaactcctgatctcaggtgatccatccgtctcggccttccaaagtgctgggattaaaggcgtgagccaccgcgcccggcctgtaaattcttggggctacatcctgaccattggctgttcccccaggcatttggaagccaaactggccataaaggcaagttctcaggacacaaaacaagacgaaaggagaatcgtatcccatgattctcctcttcacaacaaaggacccaagagacagagacaaaggcaaacagtgactcttcctgggaggctgaagatcaccgaggactcctcgagatcagatgcgctgaagtcaaaaccaaagaacccattcttccgaatgtggctctgctggtccaaattcagaaaggaagaaaacaaagagactttgaccaccctcacacagtcgcgctgcagacagaaatctgggaggctgacttgagtaagaattctttttttttttttgagacggagttttgctcttgtcgcaaaggctggagtgcaatggtgcaatctcggctcactgcaacctctgcctcccgggttcaaatgactctgttgcctcagcctcccaagtagctgggattacaggtgcccaccaccacacccggctaattttgtatttttagtagagatggggtttctgcatgttggtcaggctggtctcaaactcctgacctcaggtgattcacccacctcggcctctgaaagtgctggtattataggtgtgagccaccacgaccagtcttgagtaagaattctttcttttggccggctctaccaggggtcctggctctctgtgcagctcccagaccaagtgaggtgttccagccaagggtacctcatccccatgactagaaactgcagggagggtcaaaatcttttccttctccccatcttaggttccttggtgggggccctgttgcttggactaacaaaagacagattcacaagagaaaaacataccagtttatttactagaagttgcacatgacatgggtaccttcgtaaggaaacgaaggcccagagatccagtccactgagtgtgctgatgccaggttggaagaagagtggagaggcgtgggaagtgcgacggacaggggagtgagcctggggcaggaaactagggggacatgccatcttcagagatgagtttgccccttccctctgggtatagggaaggcgcctctcataggatgatctcatggcctgctccagaggagaaaggggaggtcagagagtcctcgaggcccagcctcccacatgcaagctgtgtgacctcgggctagtcacctaacctctcagagctctctttcctcctctctctacactggggtggttgaaatgcttgacctcttgctccctcatagggagtgctcagtgacattggcggttgtgacgctcagctcaccagtcctgcctacttgccagcaggtattctcagagggaccacagagctgagggtgacctgcaccagtacccacttgggaccataattcgtagataaggttcaggcacaacacccagagaaggaaatggcagccacctggctcggttgaaatactcatttcaagggaattccttgtccattcaaatgactgaacaacagcttgatttcatggaataatggcttttattaagaagccaacaggaatgatcatagtggggagtcttgtgtcctggcagtgggtgtttgtagagcacccggtggtcaccagcaactctgtgcaaggctcagtgggagggtgattggtgtgttggaggatgtgggtacacagtagcataggcatgcatgtggctgagtgcacacatgtgcatacatgttcacacatgcacccgcagcgggaacttggtgaatacttgttggttggtggtggtttttttttttttttgagatggagtttcactcttgttgcccaggctggagtgcaatggcaccatctcggctcagtgcagcctctgtcttctgagttcaagcaattctccagcttcagcctcccatgtagctctgggattacaggtgtgtgccaccatacccggcttttttttttttttttttaagtaacagggtttcaccatgttgggtcaggctggtctcgcactcctgacctcaagtgatgtgcctgcctcggcctcccaaagtgttgggattacaggcatgagccactgtgcctggctggttggtgggttttgactggaaggctatggagctccagtggtagatgtggttataagggtaactggggggtctcagagtgggggccagttgcatcaggcccctggagggtgggacactgcctttccaagagcaacaaagtgtgggcgatttgtggtgctgagaatcctgagcaggcagttcgtctagagcagggttgcaaactttttctgtaaaaggccagatagtaaatatgttaggctttgtgggccttgtagtctctgttgcaactactcagctctgccctgatgaggcaaaagcagccacaggcaatgtacaaaatgtccgtggctgtgttccaagaaaacgttattggcaaaaacaggcagtgggccagatctaagccatgggccgtagtttgccaacccctggtctagaccactcccatttataaagtgattcggctttagcagcttcctggaaggtggtgctgctggctgataaagcagagggatggagcttgtagaattcaggtgatgatagggcttggatctgagtccccagcgcgtctcatgttgaattgaaactttggaggtggggactggtggcaggtgattggatcatgagggcagatacctcatgggttggtgctgtcctcgagatagtgagttcttaccagatctggtttaaaagcatgtggcacctctgtcccactctctcttgctcctgtttttgccacgtgatgcacctccttcctttttgccttctgccataattggaagcctcctgaggcttctccagaagctgaacaggtgctggtgccatgcttgtacagcctgtagaaccatgagccagttaaacctcttttcttataaataaccccatctcagcaagaatagccaaacacacaggtttgctgagcagagccatacggccagaagataagtgggggtcccaagcccaaatgtgggatagtccatcctcagagctgtccttcctacacccctgttctcctcccgggccgggatgcagcgctgcccctggcccctctggagctcagcagggagccccatgcccttccaggtgtggagagcagcctgcgtgtcactggctgccgccagatcttacggagcctcccagagcacaactacgtcgtcctccgctacctcatgggcttcctgcatgcggtgagtggggaaggggggagcttggggtgaagcccagtggccttccctcccatgctgggcccgcatggaccagtcccctccttgccctgggtctggggtcatgccctgcttgggcctcggaataccactccctgccccccaaggacctcatccaaggcctggtcaggcacccatgctgctgcggacctcctgcctgtcagacagggcgtacctgcccctgcctgctcctgtacctgctgtccctcagccattgccagtgacttttgttattggggtcctctgcccccatgtcatttcctgcttgggctgagtctctaggaggtgggagctgtgtccaccactggtacagagcccagtggactgagctgaccattcctggggaagggatacacccagaaccacgtacattaagttcctgtgactgcatcgtgggtgccttaaaacagatttactgtgtcactcttctagaggctagcagtccaaaagcaaggtgtggcgggctgtgctccttccagaggctctagggaaggttccccttcctggcctctcccagctcctggtcactccagctatgcctccagctcccccctggcctttgtctgtgtgtgtgtctaatctccctccacctttccctcctaagtgtggaccccctgccatatgtcactgggtttaggacccacccagatgacgcgggatgatctcatcttgagatcctcaacgacagctgcaacggccctcgttccaaataaggtcacagtcagattctctgtggtctatcttagaggggccaccattcaatctactacacaccaggctaagcaaatgaccagagagagagaaacccttcagtgctctgggcctgggcttagtgtgctctccccctggggcagggatccatttggagcaaaaacctgtgcagccaacaggggaaggttcaacacatccacgtgggtccacccccaacccccagacccacggccttgaatgtttaaccccctccatctctccaggccttcgccccaggctgtgcagggtgaggagagcctgagcagagtaggcgtcacatcccagagtctgttggagaatgtcacttcttggttttacaacaattttttttctccctgttgcttgacataatttctcagaggcccaaaactaaactctcctaattctctcaaaaaaattttttgagacagtcttgctctgttgccctagctggtgtgcactggtgcaatctcagctcactgcaaccccagcctcccacgtagctgggattacaggtgagaaccaccatgcccggctaatttttgtttttttagtagagatggggtttcgtcacattggccaggctgatcttgaactcctgacctcaggtgatccacctgcctcggcctcttaagagtgctgggattacaggtgtgagccactgcacccagcctacttctttttcattaggagagactgatttctctctctagccgccacctccatgggcaccgatgtgaatgcacctggtggggtgtggtgttgcgtgttatcaccccagtggcacctgggggcctcggcttgaggaggggtggcctgcagtgggcctggctggtgcacacctgcaacgggcttgggggaccggcagccagggggagcctgaaaggcatccagccatctcacctgagcatcctcaacagatctgtgagggtggtgcctggccctgcctccctccagttctctgctctgccctggtactcaccgcctcatgacccctgtttctgactgaggttccccccagcttgaatcttgtagggaggcaaggagcagagaacaggccctgccctcacgttggtccacatggccccctgccactggctggccacatgaccttgggcaagtctcctgtaccttccaggccccagattcctcatctgtaagatggggagtaatgactcccccgtgctggggttgcacgtgttggcggagatggacaaggagccccttctagcaggcaagctctttccactctccctgcccctcgtagtggcccctagatgtgctggctggtccccatcatgcccagttcgccactcacagagccgaggccagagaggtcaccaagttcgtaccgtctgtgctacagcccatccccaagattgcatctccccagaaggtgcagtggaagaggagatagtggggggttgaggctgtcacagaaggtcagagccagagggtcctccaggacatggaggccaagccttccttttagagatagggtaactaaggccctgagtgggcaggtggctgcacagggtccccattactggctgccggctcccagtccagtgctcctctcactacacctacgcctctccctaagttcgggagggagttccaggtgcccgtgccccttggtgttcactcccctttacttgtgtgtggtttcctccaggtgtcccgggagagcatcttcaacaaaatgaacagctctaacctggcctgtgtcttcgggctgaatttgatctggccatcccagggggtctcctccctgagtgcccttgtgcccctgaacatgttcactgaactgctgatcgagtactatgaaaagatcttcagcaccccggaggcacctggggagcacggcctggcaccatgggaacaggggagcagggcagcccctttgcaggaggctgtgccacggacacaagccacgggcctcaccaagcctaccctacctccgagtcccctgatggcagccagaagacgtctctagtgttgcgaacactctgtatatttcgagctacctcccacacctgtctgtgcacttgtatgttttgtaaacttggcatctgtaaaaataaccagccattagatgaattcagaaccttctaatgaaaactccatgcctctggtccttggactcttgtccatggttcctgagctgtggaccgggatagaataatgcatttgttaggatggatgttttgaatcccaacccaatgtggtttaactgaaaacaggaatggagtggctaacggctgccaggtcctgctgctgccacactgctgtgtaacacaccacctaagcccagtcactgaaagttactgcccaggagtcagtgggtcagctgggtggttctattggtcttttgagggggtcacttacatgtcctggctgagctggctggcagctggggtgactctgttctcccccaggtgtcccaagtccttccaatggccaaacggggcacattcttacaacataggtccaggtgcacacacaagcgctattgcaagcagttttcatgctttgactggcgtcctgtatgctcacatctcattggccaaagcaagcctggtggccaaggccagggtcacagagggagggccctgcaaagggggtggatatggggagggtgaagaattgggcataaagcagccaagctgcccgagggctctggggtgcgacaggactctgcagtctcaggcaggctgactcttgggctggcaaaacgggccctgtatttccatcagatatggtagagaaggatacaacttcttagtgccacagtcccagcaaaaaagccccaggttcaccctgattggacaagcctaggtcacatgctcaccttagacccattgctgcagccagggaaggctctgattggcttaggcctgagtcttgtgccccacccagaccaggcagtgggggaggagtggcaggccgctgcaggggattacccacgagtcccacgctgccgtctccccagctcttgatgcagggagaagcgggggaggttctggggagcaaaggacaaaagtcccctctacagatcccccatggtggcccctccgtgcctgcttggggtgttgaccgagttgtgccgggacccccggtacgcgttaggatgcttgggggaatcactggcagccccaggccaaacccacacccagggctctcctctgaaacttagagggtgcggtctcctcgctggcctccctcttcacttgtgtgtcttcccattattcccctgcccctcatctgccgctgtgtgtgttctaccctgctggtgctcgctgtccttaagggaggggctcgtgtggctgctgagcgaccccccacgccctgccttcagaacatggatggtacagggtcacgggcatggggacagggatggggagggttgcagaatggccgttacaccccctggtaagcttcgtgccatcccagctggggatggagtccccaaatgacacccctcttctctgcccaagctcagaacctacctgagtcacacggtatattactgacggccaatgcctatgttctgcagcaatctcaatccttgcctcctcagaagaaagagttcgactggccgggcgcggtgactcacgcctgtaatcccagcactttaggaagccaaggcagttgcatcacctgaggtcaagagttcgagaccagcctggccaacatggtgaaaccccgtctctactaaaaatacaaaaaattagccaagtgtggtggagcacacctgtagtcccagctactcgggaggccgaggcaggagaatcgcttgaacccgggaggcagaggttgcagtgagccaagatcgtgccagggcattccagtctgggcaacagagtgagactccgtctcaaaaaaataaaaaagagagttcaactgaggggcataaggatgagtgagagaccgaggaccgaggcaagttttagagcaggagtgaaagtgtattaaaaaactttaaagcaggaacgaaaggaagaaaagtacccttggaagaagaccaagcgggcgacttgagagatcaagtgggtggtttgaccttcgacctagggtaggccgggcacagtggctcatgcctgtaatcccagcactttgggaggccaaggcaggtggatcacttgaggtccagagttcaagaccagcctggccaacatggtgaaaccttgtgtttacttgtctactcaaaatatgaaaattagccaggcaggggggcagtggggccagggggatgcccaagcccagtcactgaaagcaactgctggtcattactgcccatgagtcagtgggtcagctgggtggttctattggtcttttgaggggatggcttacatgtcctggctgagctggctgtcagccagggtgactctgttctcctgcaggtgtcccaaatcctccaacggctaaaaggggcacattcttacaacacaggtccaggcgcacacacaagcgctactgcaagcagttttcatgctttgactggtgtcctgcatgctcacatcccattggccaaagcaagcctggtggccgaggccagggtcacagtgggagggccctgcaaaggaggtggatagggggagggtgaagaattgggcataaaacagccaagctgcccgagggctctggggtgcgacaggactctgcagtctcaggcaggctgactcctcgggctggcaagatagaagcacagggcccatcaaatatggcggagaaggatacaacgtcttagtgccacattcccagcaaaaaagccccagattcgccctgattggacaagcctaggtcacatgctcaccttggacccattgctgcagccagggaaggctccgactggcttaagcctgagtcctgcgcccacctagacctggcagtgggggaggagtgacaggcctctgcgggagattacccgcaagtcccacgctgcggtctccccagctcttgctgcagggagaaatgggggaggttctggggagcagaggacaaaagtcccctcagcagcgtgggtacctgaccgggccttggatgaggtccttggtggccaggaagtagtattccgaggcccaagtagggcatgaccccagacccggggcaaggaggggactggtccatgcgggcccagcatggcagggaaggccactgggcttcaccccaagcgccccccttgcccactcaccgtgtgcaggaagcccatgaggtagcggaggacgacacagttgtgctccagtgccccgtaggatggggcggcagcgagtgacgcgcaggctgctctccacacctggaagggcatggggctccctgctgagctccagaggggccaggggcagcgctgcatcccggcccagggggaggacaggggcgtagggaggacagctctgaagatggactgactgtcccacagtcgggcttgagacccccacttaactttctggccgtgtgtctctgctcagcaaactttgtgtttggccgttcttgcattgctatgaagaaatacctgagatgcggtcatttataagaaaagaggtttaactggcttatggttctgcaagctatacaagcatgccactagcacctgttcaacttctggggaagcctcaggaggcttccaatcatggcagacggcaaaaaggaaggaggcgcatcacatggcaaaaacaggagcaagagagagtgtggggcagaggtgccacatgcttttaaaccagatctggtaagaactcactcactgtctagaggacagcaccaacccatgaggtatctgctctcatgatccaatcacctcccaccagtccccacctccaaccttgagggttccaattcaacatgagatgcgctggggactgagatccaagccctatcacctgaattctgcaagctccgtccctctgctttatcagccagcagcaccaccttccaggaagctgctaaagccgaatcactttataaatgggagtggtctagaccaggggttggcaaactacggcccatggcttagatctggcccactgcctgtttttgccaataaagttttcttggaacacagccacggacattttgtacattgcctgtggctgcttttgcctcatcagggcagagctgagtagttgcaacagagactacaaggcccacaaagcctaacatatttactatctggccttttacagaaaaagtttgcaaccctgctctagacgaactgcctgctcacgattctcagcaccacaaatcgcccacactttgttgctcttggaaaggcagtgtcccaccctccaggggcctgatgcaactggcccccactctgagacccccccccccagttacccttataaccacatctaccactggagctccatagccttccaatcaaaacccaccgagtagccaggcacagtggctcatgcctgtaatcccaacagttggggaggccgaggcaggcgcatcacttgaggtcaggagtttgagaccagcctgatccaacatggtgaaagcctgtctccacaaaaaaaaaagaaaaaaaaaatttatccaggtgtagtggcacacacctgtaatcccagctacttgggaggccgaagcaggagaattgcttgaactgggaagacaggttgcagtgagccaagatggcgccattgcactccagcctgggcaacaagagcaaaactccatctcaaaaaaaaaaaaaaacaaaaaaacacaccaaccaacaagtattcaccaagttcccgctgcaggtgcatgtatgaacacgtatgcacatgcatgcccatgctactgtatacccacatcctccaacacaccaaccaccctccgagacttgcacagagttgctggtgaacactgggtgctctacaaacacccactgccaagacacaagactccccactgtgatcattcctgttggcttcttaataaaagccattattccatgaaatcaagctgttgttcagtcatttgaatggacaaggaattcccttgaaatgaatatttcaaccgagcctggtggctgccatctccttcgtgcctgcatggggtgttgacctatcggtgcaccgcgggcacctcacactccagggcaagctggagagggttctgctttctcccaaccagcctccaactccgattctgtctgacgtccaggtggcagcaccatgcccctgaggcccggtcattcctttaccaatggcggggatgagtcgcgagggtgccagtctggtggggagccactagctgaatccattttccttctaggagagagggcggctcagtagcagctcggtgctggtgggcgctgagctggccctgccttcagaacatggatggtgcagggtcatgggcatggggacagagatagggagggttgcagagtggccgttacaccccctggtaagcctcgtgccatcccagctgcggatggagtccccaaatgacacccctcttctctgcccaagctgagaacctacctcagacacatggtatattactgaccacgaatccctatgttctgcagcaatctcaatccttacctcctcagaagaaagagttcgactggccgggctcggcgactcacgcctgtaatcccagcactttgggaggccaaggcgggtggattacctgaggtcaggagttcgagaccagcctggccaacatgatgaaaccctgtgtctactaaaaatacaaaaattagccaggtggggggcagggggacggggggcggcgggggtgggcacctgtagtcccagctacttgggaggcggaggcaggagaatcacttgaacctgggaggcggaggttgcagtgagacgagattgcgccactgtactccagcttgagtgacaagtgagactgtctcaagaaaaaaaaaggttttatgtgttggcaggcatctgaggtctgtgtgccttctcccgattcctcccttggggtgggctgtccgcatgcacagaggcccgccagcactttggaggggagcacgcacagtgtttaccggagctgtgtgcgtgctcgcctgggtgttttccccttacccgtcgagcgctcctgtagcaggacgagccgcagacaaaactcctcagacaccagactaaagaaggacgaggttttttatccagcctggaacgccgacagactcgcgtcttaagagccgacctcgccgaagacaccgttcctggcccttttaagggcttacaactctaaggggttccacgtgaacgggtcgtgatggattgagagcacgtgtggttagaggtcggggggtaatcttttaacctcaggccgggtcatcggtggcaccggctggtcttgccactgacttcattcctgttgtttttcaacgtttacttcctcctcctcttcagagacaggagacagtaagagaagtggcttctctcctcgttcccatgaggtcaaacacaagttaaattccaccattttgcctcctagtgctcgtgtgtgaactcgctcgcccaactcctgagatctttgtcgggggaagcttattaccatggcaccagcttcaggtgattctattcagaggctgcgttccctggttctggctgcaaacaattacaattatagagaaacagtaacaactgcctgccatcacgtggccacctgactctcctagtgggggtggggggagccctcccctgccccgctcccgtctgactagctactactgtaacaaattgagaaagcggtctttcaggaggcccacaggtggaaactgaagtttccctacagctgcccagaggccctgatctgtggatgagggcctttgctaactggtcactgtgattcagacggactcaccgcccggtcactggccctgcagacagctggctcttgaggactggcacagctaaccaggcctggcttcctctctggggagtgacagtcagaatattctctactcttcccatgggaggaggcatggggaggccaggaatattaatcctactggatgagtttctcctgtgaggacactggagtaggtctgtgtgccctctgatattctcattcctagtgtgcacatgagaatccagaggccccccacagaacagtaagagaacacacctgaagtcacacagctagtgagtggcagagctgggatttgaaccagggcaaccccatgtttttccacggagctgtgggagccaaagggagacacctgggccttgggcttcccatctatacagtgggttttgtttttcgtctgtttgttttgagacagagtctcgctctaacccccaggctggactgcagtggcacaatctcggctcactgcaaactccacctcctgggttcaagcgactctcctgcttcagcctcccaagtagctgggattacaaacacacaccaccatgcccagtgaatattttttattttagtatagatggggttccaccatgttgcccaggctggtctcaaactcctgagctcaggcaatccacccaactcggcctcccggagtgctaggattacaggcatgagccactgcacctggccctacaatgggtttttacactgcctactcccagctctgagaacgccagtcagagaccaaaaatcctgagctaggatcagccccaccttttgcagtgactcagcaagtttaatccacactgggttgtcagctgtcaccatcagcccacgtttaggcaggaaacagagatgcatggcggtgcccctggcagcctctgcactgaagtcctttgagaggctccaggtccctgctcaccccccaccagccctcatccagcttagagcaggaggactgcacctcatgccctcactgcttcagggctccagggagcaggactacaggcacccagccctgagccctatccttcggaggaaccaccagggcctgtgggcctcagtgaggctttctggactcctcttcccctttcccctcccggctccttcttccccactggtctcttgtccaatgcctggctacgccttcctcctcccttcattcatgtttttactccctcccgcaccttcaccatacatgatctgtttttctgttctttttagctctcactcctagctaacctaggccagaatgattcttttatgcatcttgaaagttgattattgttttatttcttttctactctgctacaaagtctttttttcctttttcttgaaatggagtttcactccatcgcccaggctggagtgcagtggtgcaatcttggcttactacaacctccgcctcccagattcaagtggttctcctgcctcagcatctctagtagctgggattacaggcgcccgccaccacgcctggcttttttttttttttttttgtaattttagtagagacggggtttcaccatgttggccaggctggtctcgaactcctgacctcaggtgatccacccacctcggcctcccaaagtgttgggattataggcgtaagccaccgcgcctggcctaaagcctttttcttttgattcactcattcattcttttttttaaaaactgcaaccttccagctctgaccaaacacatccaggcacaaggcacccagaccaggcctgagtgggatccccaagaatggctcgatttggagcccgaggcaatcagccacctgtctccctggccacagcctctggaaaagccacacctagcatctgcaccccctccccaggaaggtgtcttgtgctcacacaattcagaacaaccctaaaatggtctcagaattctgttgccagggaaaaaaaaaaaaactgaaataaaaatgatggctccctgaagagcccaccattgtgagcaccagaattaacaatgacattaaatcaaatctcatgcattatgcagagaggtttacagcaaaatgcacgtctgtgaaatatatgtttcaaatttcctgactccaagaggtggccccaagatgttctcctgtggcttctttgataacagtttccctgtcacaaacgttaattgtggaatcctagcttagcactgcgtggcctcatcacccttcccttgtatcaaagcacaatttcctgatcatttccacagcaaaagaaagtgattacagagataatgtggtggaagcacatcagcacatttcagcttaaaacaatgaaatgcggtgctgaaatgaggactccagggtgtctctattgacaggacgcacagaataaattgtccaaacattcacctttgcagtaacgacagagatttttaagtgactccagagattaggcgggctgcccagaacttgtaactgacatccacaatgaattattgaattctgttgaggcataaaagtctgtagcaaaccaagtagtcagtctaccctgaagaaggccagcctgctgtcactggaggggcaaagactgggcaccccacttctggtaccatttgcagctgtgtgaccattggcaagtcatttagcccaggacggggagttgaaagtcacaaggctcagcttgggtgtttgtcctacatggtgggcatatgacctgtgtaagttctctgagctttttctctttgtgtgatggggaaggtcagcatccaccctgcaataccctgtgtgctcccaagcacctgctttgtgccaggcagtgaaagtctcataattacagagaagagcacagtacatttcctgccctcaaagggcttcctcaatagctggggagaatgtaagaaagtaaatgcggccgggcgcggtggctcacgcttgtaatcccagcactttggaaggctgaggcgggcggatcacgaggtcaggagatcgagaccatcctggctaacacggtgaaaccctgtctctactaaaaatacaaaaaaattatccaggcgtgatggcgggcgcctgtagtcccagctacttgggaggctgaggcaggagaatggcgtgaacccaggaggcggaggttgcagtgagctgagattgcgccactgcactcccgcctgggccacagagcgagactccatctcaaaaaaaaaaaaaaaaaaaaaagaaagaaagtaaatgcgcaattaactgtttttaagaactaaagcagtatgtgcagggcacagggaggtgcaggataggagacagaagagacaagagagtcgtaaacacctcctggtttttggcttgagatatgtgggcaactaagggtgatcgtccctggaatggcaggagtatgggagaaagagcaggttctgctgttgattttttaaaatttattattttattattattatttttgagattgagtctcactctgtcacccaggctggagtgcagtggtgcaatctctgttcactgcagcccttttgggttcaagcgattctcctacctcagcctccctagtagctggaattacaggcacacaccactatgcctgggtaattctcgtatttttagtagagacagggtttcaccacgttggccaggctgggctcaaactcctgacctcaagtgatcttcctgtctcagcctcccaaagtgctgggattacaggcgtgagccactgtgcccagcctctctgctgttgatttgatatcaaaaagctttacttttttgttagaataacaataacttactgtttaggggaaaaaagaaaaaaaaaaaaaaacaatgacagaaggtatacaagctgtgcctgtagtcccagctcctttggaggctgaaatgggaggactgcttgagtccaggaggttgatgctgcaatgagccgagatcatgatcatgccactgaactccagcctgggtgacagtgagaccctgtcttaaaaacaacacacacacacacacacacacacacacacacacacacacacgccaagaaaagaaaaatcacttgaaatgtgactatctatgaatcctattcttaatattttgagaaatgggcactctcgtatactgctggtcacaatgcaaatagtacagtcactttagagagcgatttagcaagctggtgaagttcaagcattgttaagtctagataataaccaagaaagtaggtataataacatcaccgcagcacggctgtcagagaaaataattagatgcagcctaaatatccatcagtagcagaaatgacaaataaattgggtgatgtattcacaagattgaagagtgtcctgcagttaaactgaacaaaataggagtgaatttatcaatatagatagatctcaaaatattgcattaggaaggaaaaaagctacagaacaataaagatagcatggcatcatatgtgtaaaaattttaagctaccaagacaatcctatatgttgttcatggattgaataatattatatacattgacatatatacacacacacacacacacacacaatgtcctatatatatacacatgacctatacatatatatatatatatatatgtgtatatatatatacaagaagaatttttaaaaagtagctgggaaggagatataccaaactcttcatagaagaaaggaacaagagggtctttacctacagctatatatttaaaaaatttaatattagggcttacagtatcaaccttaagtaaactgaaaggtaatgatgtatattatgatgcaaggatcaactaccaaaaaataatgtaaaaagatatagctggctgggtgtggtggctcacgcctataatcccagcactttgggaggccaaggtcggcagatcacctgaggtcaggagttttgagaccaacgtggccaacatggtgaaaccccgtctctacaaaaatacaaaaattagctgggcatgatggtgggtgcctgtaatcccagctacttgggaggctgaggcaggagactcgcttgaacccgggaggcggaagttgcagtgagccacgatcgctagtgcactccagcatgggcgacggagacagactctgtctcaaacaaacaaaagaagatatagctaacaaaaaaattaaaagtgaattattaaaaatattttttaggctgggcgtggtggctcatgcctgtaatcctagctctttgggaggccgaggcgggtggatcacgaggtcaggagatcaagaccatactggccaacatggtgaaaccccatctctactaaaaatacaaaaattagccaggcgtggtggtgcacacctgtagtcccagctactcgggaggctgacgcagaagaattgcttgaacctgggaggcagaggttgcagtgagccaagatcgcaccattgcactccagcctggcgacagagcaagactccatctcaaaaaaaaaaaaaaaaatttaaaccaaaaaaagccaagataaacagtggaacaagaaaccaaatgggacaaacaggaaacaaataataaagttaccaactgcatcaataattatctctaatattcatggactaaactttaaaattaaggggcagatgtcaaaatggatataaaagcaagaactaactacattcactttaaatatagacaggttgaaggtacatgaatacaaaaaatataccatgcacgcagtaggcatcaggagtgtggggtgtctatattaaccttagataaaataaacttcaagacaaaaagtattatcatttagagagggtcttctgatactgatacaatggtcaatttattcagaagatgtaactatcaaatgtaaatgcacctagtatatagaacttcaaatacaggaagaaaaaaaaacacaagataatttaaaagatagacatttcataatcatagttggagactttagcatttctctcatcaactgaaagatcaacttgacagaaagtaaagtcacagataatctgaacaactatcaaccaccttgacctgattgatatttttataatgttacagccaacaacagaagaatacacattcttttcaaagtgcacatgatacagacatgaatactgaccacattctggaatacaaaacaagtctcaataaatttaaaggaattgaaatcacatgaagcctataatgaaataaaattgaaaataaaaataaatgatatttaggtttcttttttctttttgtaaaaaagaaaaagaaaccacacttctaaataattcacatgtcaaagaagatatcataatggatgtgagaaaataatttgaattcaaatccaaattaatttgaatatatgctaatgtgatatgtcaacatttctgtaacagttaaaacagtacctggagggaaatctaaatgcttatattaggaaaaaagaaaaaaagagaaaattctaaaatcaatgactagtgatgagtcatttttaagaaaaaaaatttatgtatcaaagtaaacccacacaagtagaaggaaggaaataataaataacagaaatcaacaacgacaataaaacagacagtagaggaaattaacaaagccaaaaattagttatttgaaaagataaacagaattcacaaacacatagctagatagatcaaaagaagtcagaaattaagaataaaaattatgactttagagtctacagatagtaaaataataagaaaatattatgatcagcaagatgacaaactccttgaataattcaacttagctgaaactgaatatctgaatagccttgtatattaaatacgctgaaaattttaatggaaaaaaaccttctcgtatgtaaaactcttggcacaaatggcttcgctggtgaattctaacaatagaaagatcttctttcagaaactagaacatttctaacttatttaacaccataacctgatgatgatttgcaaagaagtctatagttcaatatccctcatagacataaatatgaaaatacttaaatattagcaaatcaaataaagcaatatgaaaaagatactatatagtgaaccaagtaaagtttatttcaataattaaaggttggtttaacatttgaaaatcaatataaatcatatttccagaatacaggagatatgcatattgttttaaaaatggatataagtgtttgacaaaattttaaaaccatctgtgatttttaaaaaatcaaagcaaactaagaagggactttctatctactaattaatgtacttaatggtcaaattattgaaacattctccttacaaaatcagaaacaagacaagggtgcccagtctcacctcttccattccacattgtattggagatcctgactattgcaatatggcaagaaaactaataggcataaagattcgaaagagggaagtaaaactgacgctacttgcagacgacataattgtttagatggaaagtattacagggtttacaaaacaactactagaactaataagaggatgtggcaaggtttcaggatataaggtgtatcagtcagggttcactcaggaaacagaaaacacaataatttgaaaagggaaagtttagtgtaaacaaatcagtagctataacagggccataaatattagggtagaaactgatctctgaagagtacctttgggctacatgagagcatcctggggaggaacaatttggaaggggaagcccatccccaaagctgagattcagacctctttggagaaggagcagctgcaagccctctgggtgctgaggtttgcccagttggctgggctgggccggtccacagtcactcgcaagtagaaaacacgcctgtgggttgcaggtaccaatgctggtgagtgggcaagcagaggctttcagtaattaataaagtttgaaaacaccaataagccagctcccaagtacttaaggctcactcgggcctttctttagtgctagatgcttctttcatgagggaactggtacaattcctggagaggcctcttgctggcatgtcttgggtcatgtggcctgttcattaacaaatcaacttggctgggagatgtggtactcgtattgtaccatcatgggccatgtgcccctagaggggcacaggaggcaaacagggcagctccagatggctccagagagcagaagccccagggaagcaagtttcaggcaacccaaggaaagctgtctatgatgggtttgtcttagtcagtttctgctgctataacaaaataccacagactaaggctgggcacagtggctcacgcctgtaatcccagcactttgggagactgaggtgggcagatcacctgaggtcgggagttcaagaccagcctggccaacaaggcaaaaccccatctctactaaaaatacaaaaattagcccagcatgatggcaagcgcctgtcatcccagctactcaggcggctgaggcaggagaatcgcttgaacccgggaggcagaggttgcagtgagctgagatcgtgccactgcactccaccctgggcaacagagtgagactctgtctaaaaaaccaacaaacaaaaaacaaaaacaacacagactgggcaatttacacaggatagaaactgattttctcacagttctggaggctgggaagtccaagacgaaggcaccataggttggctgtgcggtgagggctgctctctgcttccaacagctcctccagaggggaagagcattgcgtcctcctcacccggctggaggcggaagggcagagagggatgaaatacctcgctcaagcccctcttgcaagggcaccaatcccattcatgaggaaggagccctcagggtctaatcacctcttcaaggccctgccacctaatactatcacacaggcaacagctggattttggaggggacacattcgaaccatagcagggttaagtcgtgtgccccagggttgaagtcctaacccccagtacaatgacccttatgcagtaatccccacttatctgcagtttcagttactcatggtcaactacagtccaaaaatattaaatggaaatttccagaaataaacaattcataagcagtgtcccgccctggataggaagcgtccctccgtccagctacctgctcatgagtcacttggccaccatctcattgatcagctcgaccattgcagtgtccctgtgtttgtgctcaagcaaccctcaccccctacttaacaatggcccccaagggatgctggcagttgggatctgccaaagagaagcttccttccatgctgaccgcctgccctggacagccagcccaccctgagctgggcaccctgctctccaggggccgtgttagatggagctgggagtgagggtcctggagtgaccgctgtcccaaactgaggcttgtctcagcacagggtcccctgggtgctgtggggtggggtgtgttgagctacaggcggcagatgtctgcacatcgtgggagcccccttctaatggcagagctgtccctgggagggagggagggagctgctgttgctggagtagaggggcagggcagtgaggggtgctttggagggaagtccctgcacggtccgggagctggaggtcacaggagctgcccctgagccctgctcttggttgggagtatggctgtgatggaaccgcatgggattggaggacaaggacggagtggagtccaggcacgtccactcggcacctgcaggatcgcaggcaattccatccctttcctggcctctgctttctcatctgcctgcccagcctcacctggcagttggggtggcctaagggactccccaggggagggccctgaaccaggatggcgcagccccaaggcctagcagctctgtctctccaaagtctatgctgggtgccaactgtttgccaggcacttctagatgctggggtttggaaagaaaaccaaccaaactccctatcttcctgagtagacagataaaaacccacaggggtgcacacagcaggctgtggaagctcaaggaaccaaagagcaggcagaaggacaggcaatgccagggtcctggcgagggggctggaaggcggcactgcgaggaggcggtgctcagggtcaggtcttcagggagatggctgggggccgagggcacagcacatgcaaaggccctgcggtgggagcaagcgaggaggcaggcaaggaggagaggagcagggcataaaccagaggccagagcaagcggggcctgtggccctggaggcacaagtaaggtgagtagggtgaggcctttagcttttgctgaacgagacacagggcagcagggttttgtttgttttttgagacggagtttcgctctttcgcccaggctggagtgcagcggtgtgatttcagctcactgcaacctccaccttccggtttcaagcgattctcctgcctcagcctcccaagtagctgggattacaggcgcccggatggcagggttttgacagcgtcgccatcacactagttgctgggttgagaagagactgcagcggggcagggtttggaaagagcaggtgggtggcagctgccggaatccaggggagatcatggggctgggaccaaggtgattttggggtgggcggtgaggcttgtcccatcctgcttatgtcctgagggcggagctgatggatttgccaaggaccaggtatgcaaggtgggagaaaagagccaagagtgactcccagggtgccagccccagcagcctgaagctcctctgagatggggaggtgggagggactggcctggtagagactgtgcagagcgtgagacacccgcagccgtacagtgggcctgggggtacagacagaagccaggggcaggtgaaggccggctgcgggagatctgaacacagacctgggccttcagtgattaggtagaagagaagcaagtctggagcagagaccagggagcagccacattggcaggagtgaggtcccaggagcctcctttggcagggggtgtggccaatgtgtcctctggttctgagaggtccaggtgatgaccgggagcaccccggggatctggccatgggaggtcactactgacctggtgttccagaggtgcaaaggggtggggagtcggactgaagagaatccaaagaggacaggagtgagccacggatgccgagtgtggtcttttgagtggcccccaggagggctcaggcagagctgacttgaaacctgctcccctcctcccaaactattctccccagggcaagccatgaagcgggactgtgtggcagccctgcatgccctccacctctctgtcccctggggcaccggaccccactttggcattagaccccagcctctggccacagctaactgcccaggggtcggccccgacccacttggccaatcagagtcccccgtgcaatgccaggagctaggactcaggggggctgattccccacctcttgtagggcaaggtgtaagctcagcgtggctgcaggagcgcctgtacccgctgctgggggagagagacagcggtgatgttgccaggctgagaggcaggaacccatgagggagcagagggcaccaccttgggctctgcacagtgacagacctgctgggtttccaagactttccaccctcaatcctagccctaaagggtcacccgccgcctctgaggactgggaatcgggggtgagtgagtggagggcactgagctctctccctgtttccctccctccatccctccctcctcaggatgggagaagaccctgatttccagcccctccaacgcccacctggctgccctgggcactcccgggggcctctccgcaacgcaaggacaccaaaaccacagggctttgaaatcatcgatcgagtttaatacattgtaaagaaggaaaactacattggcgtatttaagacaaacactttttctctatcctcactacccactggacggtcctccttggtccaaaaaaaacctaacaatctcaagacacatcggcagctacccctcccgggtccaacctttcagatcctcccattacactgttaaaacatgtaactcaatccatccgcgaagaaaaccaaaccaacagaaaaggaagctgaagacatggacatcgcaagccacgcggtaatgcatacttggcacagagtagccaatatagaagacgtgtgcctcacacggttcactttgttcatcaataaaagaatataaaaatcttgttcacccagtggtaagtgtattaaaatagatctgtatcatacagcacagtttctcccggagtcgtgagaatgacaggagggaccgtggcagctgcgggatttgccggcctcctcgctctgcacctctgcgtgtgtgcatgcgtgtctgtggtcgtggccgcgtgcgatgcacacacgcgtgttcagtgcaattcggcaccatgtgatatgctcggggtgggagcccgtggctcctggacgcttatcctgttgtgctgagtccctcaggactgggatgtgggaatcgggcaagggtgacaagctgccactgcccaccctggatgcagaagcccttggcagcaagtctggtccccgaaggccggaacctcccgagccaccgccctttctttcctccccaaccctccacccggctcgtaaaaaacctgccggatcttccagcttggccaggcttcccgaggggaggtgttcccatttgtaccttgaagcagagactactagaagcagaaaggaagtcagccagagtccccccaaccattcacattaaatatctcacaataaaaacgccatacaaaagtgtgaagttattttttggcatagtgtctgcactggcaagaagggaggagtggaatacttatcggctcttccaaaggagacaagaaagggcttcagtcgttaagttgaatgattcaaccccaaggagaaaacctgccaaatgctgccccccacaacagggttgcagctccactctgcccagaaactccatgagaaaaacgcatcaacggcaaactgagtccaagagattggcaaaaggaaggaggcagccttgaggaccccaaagacggagcaggaagggcacaggctctggcggggatcactgcagcgtcccggcgcccagatgctcacctccgacagtgtctttcaagttaaacagctgcaattcgtaaccctaataatactgacagaaaggggcccaggtggttctgcaaaggcgacggagtgccccaggcccgcccgcccaccccagggggacctcctaggagcgtggggcattgaggaactacctagatccactaccccgcttctcgtcccaactaccgctaccactcagctagtccatgtgttctcagctcgccctcccacaggacaccaataggcggtgccctcagtggagactgcgttctggggggcgtgcttgtcccctccacagcctcagcctgcccctccaacgggccagagggaggccgtggagagcagggcctggaagccagaggcccaggcagccccgaggtggccggggggagactgtgtgccccagcctgtcgtaccccacctggctcctaggtaccccctgtgaatttggagggcacagggccgcacccccacctggtcctggctctaggcctctcgcccagctcttcctccctcctctcctctgtctggttaatttttgtctgaaattcatagtgtttatgaattaaggccgacagaacccccaggctgtgtaagcagggtcccaataactttccgtgggtatgaagactggtccctcggggtcagttgtggccctgggggtgctggacggtggggtgtgtggctgccactgagggcttggtccagggcccggccagcagtggggcagggctagtggtcgtcatggtgacctggagcagctgctcgccctgtatcagtctcaggagggcccgcaggcggtccagggatgactgggtgcccctctggcgggccagcaggcttgtcttcaactccaggcatttctgttggggagaaggtcaggggaaagggtctcagtattcggctctacagccatcctggggcagccaccgtctgggcccctctcccctccactacaaaggcctacaagaaaccaggctgagggcttcacaaaaaccaggcagtggtgcaaatgcaattaaagagcagccagacccacaggagatgatgctcgctttggaacttagggctagaaaaagtgtggctctgcctgggaacgtccttcccatggctgtgatgtgacctcctcctccccgctagctgcccacactcttcctcctcctcctgctggccaaactgcagcagcctcggaggcctttggcttcccagtcgcctttctgctctttctctcgcctgttgtgctgtgtggtgctgcacaacacactgtctctctacgcaccaccgcaacaaggaaaagcagtaaggactgatgcctacagtcccatatccatctgctctgggtgaaatactgcttgggcaaataacaacctccccgagatggtttctaaaatgattatagggacaatcacaaagcctcttcacagcattatagagaggattaaatgagacactgcatttaaagagcttccccagggcccgctaccatcaccatcctctaacacatcaacaccaccatcatcaccattactgtgatcattaccaccatcaccaccaccatgatcaccattatcaccaccgccaccaccatcactgtgatcagcaccaccaccaccatcaccaccaccatgatcaccattatcaccaccgccaccaccatcactgtgatcagcaccatcaccatcatgatcaccattatcaccaccaccaccatcactgtgatcagcaccatcaccaccatcattaccaccatcaccaccacgatcaccaacgtcaccaccaccaccaccactgtgatcagcaccatcaccaccatcatcactaccaccatcaccaccaccatgatcaccattatcaccaccaccaccatcactgtgatcagcaccatcaccaccatcattagcaccatcaccaccacgatcaccaacgtcaccaccaccaccatcacggtgatgagcaccatcaccaccatcaccaccaccatgatcaccattatcaccaccaccaccatcacggtgatgagcaccatcaccaccatcaccaccaccatgatcaccatcgtcaccaccaccaccatcactgtgatcagcaccatcatcaccaccatcaccacaaccatgatcgccattatcaccatcactgtgatcagcaccatcaacaccaccatcaccataatcaccaccataatcaccattatcatcaccaccatcaccatcactgtggtctgcaccatcaccatcatcaccatcatcattacaaccatcaccatcaccaccatgatcaccatcaccaccaccatcactgtgatcagcaccaccatcattaccaccatcaccatcaccaccaccattacgaccaacaccatatcatcatcaccatcaccatcatcaccaccaccaccattatcatattcccatcaccactatcatcaccatcaccattactaccatcaccatcatcaccaccaccacaaccatcatcttcattatcttgtctatctccatcctatggaggaggaattacgttcactttacacaagaggaaacagattcggaggtcagggccctgccaaggggcctgagcaggcgcacagccagggtgctgtcaatcgcttgataaatatttgttgaatgagtcacagcgctgccttctccacatactggcttgctgggggatgcttggtgagtctgtcttcttcctaggccttacaggtgaacagtgaagctctgcatccacacctgtggttctaaggacacatctgcctgtccccaggccccggtgcacacctgcagggctgaggccagcctggatctacacttgtggtttgaatgacacgcctgcctgtccaccaggccctggctccttcctgcactgctgaggccagcctggatctacacctgtggttctaaggacacatctatctgtcccctagacccggggcacacctgcagggctgaggccagcctcccccaggccccggggcacacctgcactgctgacgccagccgccggtcccgctcctccagctgctggtgctcgttctgcagctcactgcctcgttgcagcagcttctgcttctcctcttctttgactagaaaagagaaggccaggtccctggagaggggcaggtaaggagcggctgggtcgtagagtaaatgggagaggcagaagggatgaaaccaaggcctaggacatccccctgaagaagccagtggctgtggccaaatgcacaggacctggagccactctcccctggccacacctgccccggacacaggaccggtcccaggatcccacttttcagtgctctggccctgaagggaatggacccacctgtcctcccacaggaccaggtgagcccagaggcctgggtgggggaggagggggagcaggtacccttttccactccccagggatgcctcacctgtcttgtgggtgacataagagtgcacgatggccagcatcccagtccagggcacaccctcgtctttctttaaggcctggggagcagacggggagatgaaaaagtggacaggccctgggacctgctgggactgtccacaccctggctgtgtaaccctgagggggcacgccctgtctgagccacagggtcctcacccgtgaccaggagctggggccgcacatgcctcatggcccagctcacaggggctacacagctccacgaggctggaacattctgggcctctcccctgctcatcaccagggccctgaacaggcagcaggctcaaatacttctcgaacgaacgaatgatcacctgtcttcctcccacgtccagaagacctgagggcagcgaccccaggcacgccagggacaaatggagagactcgatgtcccccacactatgctgaagtggggaacagaattctgttccctctccacatggcctcaaaaagttgtgacaaaaaagaaagaagaaaaaaggaagaagaggcaaaaaaaaaaaaaaaaaaaaaaaaaaaagctgggcattaatcccagcagtttgggaggccaaggtgggaggactgcttgaacccaggagttcgagatcagcctgggcaacaaagtgagacccaacctctacaaaaaattaaaaaattagctggccatggtggtgtgtacctgtggtcccagctcctcaggaggctgaggtgggaagattgtttgagccccgaaggtcaagactgcagtgagctgtgctcatgctcctgcactctagcctgtgaaacagagcaagaccctgtctaccaaaaaaaaaaaaggatgtaacccccgacccaggcagtcacaatgcaggggcaggtagccgcagagggaacagcccgacagcagcccctgcccaccatatccacagcctttgatccccacagaaccagggatgatgggaactcccaatggttaatactttttgaaataaagtattaaaactcccggcctgggtgcagtggctcatacctgtaatcccagcactctgggaggtcaaggcggacagatcacttgaggtcaggagtttgagaccagcctggccaacatggtgaaaccccatctctactaaaaatacaaaaaattagccaggagtggtggcgcatgcctgtaatcccagctacttgggaggctgaagcaggagaatcgcttgaacccagaaggcagaggtggcagtgagctgagatcatgccattgcactccagcttgggcaacaagagcgaaactccatctcaaaaaaaaaaaaaaaaaaagaaagaaagaaaggtaactccctatgaccacacaagtcatgcatctgtggaaggcacacttgaagccaagcactgctgccacccgccacccaccacactcaggggccacactcccaagcgttttctcccagggtttttactctgcagtttttctcagatggctgattcccaaactatatagcagctgtaaagcctgttttttatctttataattccatatagtgaacaagatccagagaatcacactttttgtaaaaacctgttggatgctggcggaatatctcactgagtgcagagctgggctattccactatctcccgctgctgggaggagaggctgcttcccctctagtcttgatcacctgaggtcaggagtttgagaccagcctggccaacatggtgaaaccccccatctactaaaaatacaaaaattatccgggtgtggtggtgggcgcctataaccccagctacttgagaggctgaggcaggaggatcacttgaacccaggaggcagaggttgcaatgacccgagactgtgccactgcactccagcctgggcaacagaacgagactctgtctcaaaaaaaaaaaaaaaaaaaaaatcccataatacacaggacaaagttcctcaaccaaggattatccagccccaaatgtcaattgtgctgaggttgaaaaagccttcctatacccaagccccttttttcacccctcctctgccctgtctctgcctacggtggggacctccatgccagtctggggtgagggggtcacacagcctcctgtaccttctgctggcacctggggcacacccacacgcccttgggcgccgtcttgaggggcggctccaggcagctgaggtggtaggcccccgggcaggtgccgcagggctgcaggttggcccctcgcttgcaggcggcacagtgctcatcgtgggtgatctcgttctggaagagaagggagggcaggagacaggtcagccacagccagggcagcgggggccggtcagccagggccaggcccaggcagctgtgtctgacctacatgtggccgctcttctgccaacgtttcccagcagctctacggagagagagggataaaccctggagggcgacagtgtggggtcaggcctgggccctgggaggagggggggcacccacagggccagatttactaggggctggggcactgagcattggagtctggcctggtgtgactcccataacctgattcttctgtgctaagacctggaccccaggtgcgggcgacaaggcaggctgtcctgctgcggcctagaaaacagccccctgagggtctgtgttgcaccagaggtccatgtgctgggagtgggaccagtgatgaatgcagcactccctccccgcccccactgcttatgtggacactgcctggaggggcggcgtagccccggccaagaccctgtactcggctctctgttcaccatccacgtgtcaacagcatgctccaacttcagagttggaaaagaccagagagctctcctctgggatggcccgtgccacaaggacactggatgtccctgaaggaggggcaacaccctcagaggaggcctcagaggtccctgtctccaccccttgtgtcatgcaaatgcccagggagggagaggcggttgtcacacagggagggggaggcagttatcacacagcaagctggagggggagccgggaccagcaaccaggtggcctgcctcaaagccgaggccctctccaagtctgtgggctctgtggggacagagctcaggctccaggtgtcccctgtccacatgcccgccctggatgggcacaagatgtttgcagataaacactgccaggccccccagcaccaacccgtgccattgcagggctattgtgaaaatgacacagcctaaccggagctgactgcaatcatcacctactgcttcttagaggcttgacagttacaagcatgcagggactagaatgttcttttagaattagatcagaaattcagtgaagaaaaacactgaataaattctgagatcatgccatgaacgaggtcatgaccagccaatgttctgggaatcagggatgtggtgtgtgcacgggtagggggtagggggtagggggtgggggccccacaggatcacagaaatgtgggtgtgtggggtgagtccctggggattaacaagtccagccccttttcggacgggtaacagaagaccagggagggccagctctgcccaggtcacactgaggccagtagagccagggtggaggcctttgggcaccagctggctgcttccagttgggcctcagtggcccctgcagtctctgcatcctcaattctgaggagggagggctcctgtttgaagctgagagcagagccctgtggcaatgcccgacttgacgctgcctggccggctggaaagctggctgagtgttgcacaaagctcttagcacctaaaggcagaaccgaaaggccttctgcaccactccgggctctttccctctttccaggagggaccctatgaggactgtactgaaaacattctccaccccggaagtgtgaagacggagggaggggacacgtaccttccagcaggggtcctcattggctagcacagggaagaagggcggagaacacgttagtggccgtcagaggagcacagatcaggactggagtccatgaggcctcatgtggcaagggctcttaccccagggcatgatgggagcatcataaggcccccatgatacctgggctctcaccccagggcatgatgggaatatcacaaggccctgtgatacctgggatcttaccccagggcatgatgggaatatcacaaggcccccatgacacctgggctcaccccagggcatgatgggaatatcacaaggcccccatgacacctgggctcaccccagggcatgatgggaatatcacaaggccctgtgatacctggggtctcactcctgggcaggatgggagtaaggatctcagccctggtcacagctaggagccaccatgggaacaggctcatgtggcccctgtgctgaggacatagtggcagtgagctgcccggggggaaggaaacatcactccaagaacccctcaaagtgacttattttcaactctttttaaactgtaatccactctcattctagtaaatgataccaaaccacacattttaatgatcgcaaacatatatatctttcaggttccagatcagatctgtctgcaaataatgccacccagcgggagaacagttccggagtctgcacagcactcgacagctcacaaagtgcagtcacactcgcccttcaagtcactgtcccagctctgagaagcaggtagctatgggcccactttccagatcagtaaaccaaggcccagggagggatggtgacatgttgaaagctacacagaatcccagcaagctggtcgtcatttcctgctcgtgggactatggttttctaactgaagagaactggcagcttcctgctgctgtctgaatgcaaggatgtggctccctgaggtcctgcactggggcacggctggcagaggagggaggggccctgcagacacaggtagaggcctgaggccaggttccagcctgaagatctggcccaatgccttgtacagaaggagccctcggctccaacacacacagcgaggcagaggcagaactgggctgagatccccacccctgtccagcctgtgctcttccaatgcccagagcaggcacaagagggtgggcaaggtgtgggctgagaggcgccagcccagcccaggggtatcagaggccgcccgcgtgtggggaagagaggttgtctccagtggagtatggaagcagcagcacctgggctgggtcacacctgcagaggccccatcggtcacgctcacacctatggcccaggctgtggacctctcccaggccacagctccaagctcacacacaggctgcaggaggagcggggaggtgggaggctcctctcagcacagcatcctcaccttcctctgcccaggtcagaccagtgggaggcgggcagccctgcccaggcccaggcgtggaggaccacccagggatgactccccgcggccctgagcagctctggcagaaggcctgaagccggtgcttacctctcgctgtgaggaacagggggttgttgagatagttggaggccagccgtttcctctgcagggacagaaaacaaaacaacacaccccatcatctggaggctctcttcgatggtgacgtcaccccaggtcaggactctctctgggacagggttcccacccagggctccaggctctggctggacaccccctgccaggggcagaaataggaacaaatacagggcagaagcacgcaggaatggctgaggatggggcggggcggggcagggaagtcggcaaaggctctgcctgcaggaggcctaggacaccctctctgcacccatgggtgcgtctagctcaggaagggccgtcagtgggacacatcagtcacatggtgcatgttacattctccacctgtctcctgcctctcaactgggtctggagtcaggtggaaaaatgggtgttatagactggctcccctaaattccacttcttggcatgtggcctgaaacatcacatgtggacaaaggtttctggaacattccagaagagcggccttagtcctggctttggcaaccacaggccacaccggtctaaaccttggtggttcaaagtggctttgactgcggctgttgtaatactgcgtggccagatttgacaccacttctctcggtgtggtcaggctgtggacctggggaagggccccctcgggctgtgtgcctgctccaggctcagggtcacggggccttgggttgactcctgacctgcttatgccgtctctggccctggcctcagacttgggagcctagagtaacgcctcgtccacacagcagcctgcattttcatgaacgaacaaatctaaaggaatgaagccctccctgtctggagaacacaccatttccttgggtggaggctgaaaacacctccacgatgttcttacgaagggtccgagtcaggggacagagcttgctcagatgaaggaagaggaagtgaatggtatgaaacggcccacgtggagcacgttctcagaacaggagcggggcaggcagaagtagaggaaaggcgtggacaggctgatgaggccagaggacgccccatggtgggctctccccacagacagggcaattgcagagcctggaactggctgccgctctgcgcgaaacgcctccctcccacttgagctcaggttcccaagacatggattctgggcagtggcccagactagcccgcaccctgggaggtgagacagcactttcctcaccttcctccagatctcacagagctggcatctgcaacacaccaggcactgacctcgggggacatcgtttccctcaggacagctgtcccaagctctggacttcggagctctaagcaaatggcttccatcccagagaaagactctaagacactgcccctaagaaagccctgagcctctgagctaatggtcccaacagaccctgcagagttggctttggggagatgacattaggattttaacctaagaattttggactgtcatttacaagggcaggaaggtgtcatttatgatctggtttctccctggggacatgctcatgggagaggcccttgtgctcccctatggcatccttaaatcccaaccctgctgcactggaccgattttggtgtaggctctcggattcccacccccatccctgggtatggacgctccaactgggagtagggaagggcactggccacgcccacccagcccctttctttacggtgcccgcctgctccaggctgtgcacatcctcagtctctcccagccatgagccaactgcacaggctctagacaaggtgtgaggtggtccagggaggccagggtgtccagccctgcctgtgaccggagatttgcctgatcattcagggtgaagaggcaagaagccggtgtacctcacacgaagccacgcccaccagagagcctctattaggaataaactgacatctcctcttccgcatcttcctatcaattgactgtcaactcggaggtgatgagagagatgatttacggtcaccccccagccccactcccaggagggacagacgaggggggtgcttaggaaagcgaatgagggaggccctgggacttttcctggaggctgtgcactgggagcccccaccctcctggtggcatggggctggcgggttccccacctcggtctccaggaggccgctgtaggcagggttggctgtgcttcttctcttccgctcctgtcgcttgctctggatttctggaaaggcacagacacagcagttactgggtcctgcctgccctgggaaccccaaatgcttccttgccaagccctgggcaccaccatcccctcctgctctgaagcctctctgtgtgctcagcatccatgccacagaatggcccagggtgggttagggcctccaggaatcactgactccatggcaggacagctctggtggcctcaggctgaatgacagattggtgggaggctggcaggtacccagaatccaggtgcccactcttagcacggggtcctccttttgtgtccctatctggcccatggccgttattggggacccacaggatggcagatacccacaggttgggtgatacccactggtccagtgagctgcagggtgaggctcccagctcccggaagcccaggagcaagcctctacccaggtggcctctgccccagtgcagcccccagcaggaatccttcgcatgcgagcgagagggggcatggccacactgacggtgttttcttttcctttttctttgctttgacccccaggcaggacccatgacctgcctctctgtgtgcagctgtgctagcgtcttctaatctctgtctcccggacctagttttgctttttaaaccttctcaatattactcagcctgttttctgtaaggcactcagaccttctgtggaataacacagggtctaaagaaagaaagaattaaggatatcacagcagaggttggggagaggtttctaaatgaggactatttataaaaccaataatgatcacgcctattaggaacgcacttttcgatcagtccctcaccaactccacgaagtttacaggcgcagttttccccatgttgcagatgagaaaactgaggttcggagtggggaaggaccttgcctagggactccggccagtgcacaggcgggacttgagcataagacttctgtccccacagccccatgctgcctctgtggcaccgtggtttcggtcagagattaaatcaatcccaaaggcaagctgagggcagcgggattcatctcgctcaagctcacaccatcaggcggggagctcacagaggttcttacaaaggaaccttggctggagggtaatgccttccaaccatgcacgcagaagggtgaggaaggccaggggcaagggttgcttacagggggcttccctgcccagggatctggaaggctggggctcttccctggctctccccatcctggctgctgccagagagcaagtcagacccaggggacataaagggagagggctgtcttctcggagcctgcatggcaggctgctgtccccgcgcgctgggctctgctgagctcaggaaggcttgccctgctcccacttgccccggatgagctgtgtgacctcagccaggtccctcccctcccctgggcttcggtggctcacctgctgcaatggatagaaactcttaacttcaagactgctagtgcctcgggcaccgcgggggttcacttcattccctcttgctttgaagaagaggaacgctaggcgaaccttcccgcatccaggtttaccagggtatgtgctttccctttataaaacgcctttgcaggtgaggtgggtgtggtggaatacgttctgggttgggagtcaggaggcctggattccagcctgggcctggtatcaactggccctgggaccctgggcaagtgaatcagcttccctggcctcagcttccccatgggggcttccccaagggggctggtttcgaggcttcccaggccctaagattctaggatgacgttcacagctcacgtgagattgccctcatcattctacgatgatgttcacggcccatgtgaagctgccctcatccgtaaggtcacacagccccttcgtagagtcacagtgccctgtctgctcaaataaactactgttccaattttcacggacacatttggtggcacacatgaagtccgcaggctagtatgacggcaggggagctggtggtcagctctcccactgtgctgggcactgcttccaacaatccccagaggacagttcggccattacccattttatacatgaagagactgaggcatacagaagtaacctgcccacacttaagaaagtggtgggaccgggcagtctgcctcttgtcatttccctgtgttgagagcagggagcccacacggtccctccgctgaaacaaggaagtgccacagtgggtattgtgcatagtcatggagccagggcgagtctggaaggcttctctgtcttgttcgtctttgatgacagccacccagcctcaggcacttggggcagacctcctgcgaggtggtttatacacagacactgccatccgagccgggacatcctgagacccactgcagcagtgtgaggccacgctccacccatatcggctgctgctgaagcccagaccacccatcatcacacctggcccccaacaccccggctttcgggtcagtcccagcccaacctgctgctacctggatccttccttaccttccaaatgttccgtggtaaccaggcctagcgctaccatgaaggcgattttctgagggaaggaacagacaaaggagcattaacacaaccgtcaaagttcattcatgcactcaacaaacatctgctgtggcaggtgcagggcgatacctcatgggtgccctaaccacagaggcctccaactccagatgccaagtcagtttctaagaaacgtggggaaataggatttccaaagagagtatctacagctcaatttggagggcctccttgaaaacactggatacgtgtattcaaacatactttaaggggctaaggtgcacatagctgggctaatccttatgggtgccccaaccactaaggcccctaactccagacaccaagtcagtttctaagaaacacagggaaataggattcccaaagaaagcatctacagctcgatttggaggggctccttgaaaacactggatacacgtattcaaatatactttaaagagctaaggtgcacacagctgggctaatcaatgtcacataacacgtcactggttcataacacatttgcatcattggtcctttcatggctgtccttcattttatttaataataaattgaacatcatgaacctactaataaactcaaaacctgacacttgacccataagttgcatctcttctgtgttcctcactttatctcattcttttcaccctcatttctagtgatcctagttttgtaatgaccatttctccagttttgtaatgaccttctccagttttgtaatgaccatttctttgactttgtatacatatgcatgtatttctgtcacttatgaaacagggtggcacttagttttatctgttttttttttttttttgagacaggttctcactctgtcacccagactggagtgcactggagtaatcacagctcactgcagcttcaatctctggggttcaagtgatcctcctacctcagcctcccgaggagctgggaccacaggtgcgcaccaccgtgcccagctaattttcgtattttttgaagagatggagttttgccatgttgcccaggctggtcttgaactcctgggtgcaggcctaccccagcctcccaaagtgctggtattatagacgtgggccaccatgcccagccattacctgtttttgacttgtgaaaaggtcatgacactgtattgtctacagagctcactagggcatttttttttcatttgacattctttggtggtggaaggcagaatctagaatggcccccgagcccctaccctgcggtgtagccaccccgtatcattccctgccttgagtgtgggcaggattgaaaataccacgggattaggtaacatcacagagcgaagaggtgccaaagccactcctatggcgtatgatgttatataagacccctgttggtgacgggagtgaggctctcttgctggccttgagagacagcctgccaggagtcctgcagccaccacgctgtaggaagaacaactcctggagcctcactcaaggccggccacagagtaggtgctcgtgagtatttgatgaatctgtgagtcaatatttccttgtctgggatatgacttgcaatatattttccccctttatcttttatttatggggctggcttatttattgtagtttcagatttacagggaagttgcaagactcattactgggagttcctgtataccccacacccagttcatcgcaactaaagaaccaacgtcggtacattattatcagctaaaacccatactttatttggatttctttagtctttttgttttttagagacagagtctcactctgtcaaccaggctggagtacagtggcacaatcatagctcactgcagcctcaaactcctgggctcaagcaattctcctgcctcagcctcccaagtaactgagactacaggtgcacaccaccacacccagctaatttttaaattttttgtagagatgaggtcttgctatgttacccaggctagtctcaaactcttggcttcaagcgatcctcccacctctgcctctggaagcactgggatacaggtgtgagccactgtgcccagccctttgttttctgtcccaggatcccacatgatatttagatatcatgcctccttacactcttctgggctgtgagggtttctcagcttgtctttttttggtgacctggacagcttgaggaggactggtcaggtattttgcagagccaccctcaattgggatttgtctgatattttcctcgtaagtgggctggggtggtaggtttgggggaggaagaccacagaggtaacacaccttctcatcacatcgcagcaagggcgtagaccacccacctgactcatagctgctggtgaccctggtcactggctgaagtgtgtctgccaagctccactcagcaaagccactctttccgtgcctgccccgtgcccccataccatacttattgggaataagtcaccatgggcagctcacacttaaggagctgggaatcagactccactcaggcagggcttttttcactttgttgccatgcatctagatttttttaaaaagagtatcgatttttaaattatagtaaaaattttaaaatgcatcaatttttaatttttaaaattttaaattaaattgtaatgaaacttatcaatattttcttttgcagtgttttgattgtttggatcctggctagaggagctgaggtaataaaataattttagtctctatagtttcactttttacatttaaatttttgatccatttggaacggatcctggtgtgcccggtgtgaagtccgggctcactgctttctgtatggctaccatttgttccaataccatttactgaaaattccatcttcccgtgtttcactgacttaaggagccactttaatcatatactaaattatcatagatctatttgggtctatttctgggccttctattttgttccttaaatctgcctctctaggagctcctgccacacgttcagttctcaaggctttagggtctattttaatatccgggaggattagaatatcccttcactgtttttcctgttcagtttcctggctcttcttattttttcatgtgaaatttagaaaccatcttaggaagctctgaggatgagggaatcagttggtggatttgctggaatgttaaaattataaattaactttgggcataatgacagttttatattattaagttttcctacttaaatctatgacatgcccctctgttcttattcttttttttttttttttttttttgagacggagcttcgctcttgtcacccagcctggagtgcagtggcatgatctcagctcactgcaatctccgcctcctggtttcaaccgattctcttgcctcagcctcccaagtagctgggattatgggtgcctgctaccaagcccagctaatttttgtatttctagtagagacggggtttcaccatgttggccaggctggtctcgaactcttgacctcaggtgatctgcctggctcgcctcccaaagtgctgggattacaggcgtgacctaccacacccagcctcttcttttttcttctccttctcctcttttcttccttctccttccttcttcttctcctcctcctctccttccttctcctcttcttctgtcttaaggggttttaaatttttccttaaatattgaatattcttattatgtttattcttggcatttaatctttttgctgcaatcataaatggggttgtgtataaagcttctaacaggttactgtgttgctatgaagattagtgatatttttaccttaattttacaccctgctgcaatgccaaattctcttattgtctgcagctttttcagcaattctcttgagttttccagatctcttgggtttttcagcaaatctcttgggttttctcaaatagtttactcctttctgatttttacttctatgctgttaaaaatggttctctttaatttttcagctttaaagggtattttctgattcatttaaagtcccaactgctacagataagctcatctgagaactctttccacttcccaccttctttccctccttctcctctcaattttacttacatgaatcttttatatattatcggaacacatcatatttaaactctattctgacatcctcacccacagttaaatatatttgatgctcaccccagtgctggtaccaaagtttccccatgtctcttggttgcttgggtttgggtctccagcagtttctcataaatggctcatggaacatttcctgagctctccaaagatttacaacttttttttgttgcccagactggagtgtagtggcatgatcttggctcactgcaacctccacctcccagactaaagtgattctcctgcctcagtctcccgagtagctgggattacaggcacccgccaccacgcccagctaatttttgtatttttactagagatggggtttcaccatgttggccaggctggtctcaaactcctgacctcaagtgatccacccgcctcggcctcctaaagtgctgagattacaggcgtgagccactgcacccggctagatttacaactttttatctgtagcctttaaacttgaaggacagcttggctgcaaatgaaatccttggcttgttctttctttcccttattttcttgcagatgttactctagcgtatcctggaattgaatgtggctgtggaaaagtcagacaccagcttaactgctttccctctaaagtgactctttttttttttttttttggcctggatgcctataggattcttttgtttccatagtcaatcagtaacttcactgggtgtgtctcagcattacacattttccccctggagcacacatcagctgtccctgggacccaatgtgtcctttcaagatgcagattataaagtctttttaaaagttcaggacattttccttgaattatatttcaaaaagtgaagcatcaccataccatgaaaagtggggtctgtcaaactcaatcctgtgagatgtgcactcacataggtggaagatcagtggagcagctgagggggctgcagagccacctgactgggaattctggggccatccagcagctcggccaatcagtaccagtctggcagcagtctggtgccacctggttcaaatatcacttctggaccctgtgtctaactaactggacagtggcagggactctaggatgccctgagctgctggcagccgttttactggcctgacctgggaaggctgggctgggagaacactgggaatgtggtgcctccacttcctcacatcatcttctcctccccgagtcccctccactgacactcatttgaagacaggttatgaacaggaaacaggaaccaatgccaaccacaggacagccaaattcacctcattgcaggaaattatggaaatgttttcatcattctggtttccttctttgatgcctcccattatacatgtgttgtatcttctttgcttgcctcctgtaggtttcacttactctgaaacttaaaaactcattattgagttctctttcccatcttgcaagatggtgagaagttggatactgaggagaagaaacccgaagccaagaaggctgatgctggtggcaaggtgaaaagggggaacctcaaagctaaaaagcccaagggggaagccccattgaagctgaaatcccatccttgtcagaggaattggcagatattcccaatctgctacatattccagaaaggccgtgtacaagaggaagtactcagctgctaaatccaaggttgaaaagaaaaaggaggagaaggttcttgcaactgttacaaacagttggtggtgacaagaatggtggtacccggctggttcaacttcacaaaatgcctagatattctcctactgaagacatgccttggaagctattgagccatggcaaaaaccccttcagccagcatgggagaaaattgtaagccagcatcacccctgggaccttctgatcatcctcactggacaccacagaggcaagagggcggttctcctgaagagctgggcagtggctgttacttgtgtctggacctctggtcctcagttgaggacacaccagaaatttgccattgccacctcaaccaaaattggtatcagcaatgtgaaaatcccaatacatcttactgatgcttaattcaagcagcagcagctgcagaaccccagacaccagaaaggtgagctcttcgacacacaaacagagaagtacaagattacagggcagcgcaaggttgatcatcaaaaagctgtggactcacaaattttactgagtatcaaagctattcctcagctccagggctacctgagatctgtgtttgccctgatgagtggagtttatccctcacaaactggtgttctaaatttcttaagaacctaataaaggatatataaaaataaaataactattttttgaatttcgtatacttttcccccttctgcctctggtgtcccttaccgtgtcttctgctgtatccatggccctctgtgttcattcagctatgcatccatttctgggatggttttattatttttcatgaataattccagctcatggttaattctctccagtaatttagccacttagccatctcttccataaatctgtgtattttagccatgtagtttccttcttagtgctgattgtttcattaagttttttttaaaaaatcacagcaggatatcaatttttttttcctagtattctttatgttatggtaaaaataacttctctttcctgtattttttgcttatagcagcttcatattgatgttttgttgttaaacataactaaatgagctgaattttcccatactggagatttgtagcaggtgggaaagggattacattagccttctagaagcaactcaaaggctctgcctctcctgccaaggcaattgacttcattcttcgtccctcagtgggattctctggttaaccacgcctcctctgcctctcccccatggtcaaagagcatttctgccaccttccctgttcctggatgccttacagattgcaggtgcaatccctccaggagacatattttgcctggcactttctaagacctgacaacaccaagcactccctcctccagcacattctctctatattatctcaggcccagctttcacctgacccagccctgtctaagctaagactagctcagatactccctttccttttgcacttcaagatggacttctgatcttcagggagtgcatgccactgactttttctgcagcctgtggctccttggccctctctggagtcccctacaccactcctggccactgctcattgcaccattggcttgctgcccagccctgacctctgctgcctctgacgacactaacacttcttgcccagtctgccgatgctctgctcatgtctgaaatccacaaaatgaagaaaaaaattcttgttgctattagtttataggggatgcagggggagtctcagttctaagtagctgctctgttccttctggaagctcagccaagtctttttgccctgtgggatcaactggcttcattctgatagacgtgtgttcaaaactgtgttctgcagattttgtcaaatttgccttttacaattctgctgttaggttggtgcaaagtaattgcacaattacttttgcaccaaatgcatatcccaaacgatgttgctatggtacacttaagttcgtgactgttaaattatcttgatggatgtacctttagtatttacattaatatgtctttttcattcctttcaacctttctggtgttgtttatttaggtatgcctctgacaaacagcacacaactggattgtgttgtttttaagcctgttttcatttctctaaaagtaggaagatttcatttgcatttattatggttactgagttatttggacttatttcctctactttatttgtattttcagtgtatcctttttcatttcctacttcttgggaaaaaaaagctccacattcactttttttttcctctgctgatttagaaattataggtggcattacatttttttcactgattagcctaaatgttttgagcatatgtttctaactatacacttttctaataaaggctggagttaatatttctattcttcttccccaaattacactgctcctggcatgttctaactccctctaaaacatcacctccaaccaatttattgtttcctagaattttccttttatctgctttgtaaaacaaaactggattttttttttcagtctacacttaaatacatctacctataatttaacagtctatacactcggttgtttcttatacccactggctgtctctggcttcatctatcttctggcaaaagcacagttcttttaaggatggtctgtgggtgataaaacccttagtcttcctatgtgtaaaatgtctttcttttgcccttgctcttgaaaaacaacttaactgagcttccagaaggaacagagcagctacttagaactgagactccccctgcatcccctataaactaatagcaacaagaatttttttcttcattttgtggatttcagacatgagcagagcatcggcagactgggcaagaagtgttagtgtcgtcagaggcagcagaggtcagggctgggcagcaagccaatggtgcaatgagcagtggccaggagtggtgtaggggactccagagagggccaaggagccacaggctgcagaaaaagtcagtggcatgcactccctgaagatcagaagtccatcttgaagtgcaaaaggaaagggagtatctgagctagtcttagcttagacagggctgggtcaggttggcagcaactttccctcggcagtctgcagatatttattgctctgtggtcatctgcctgaggctgctggaggcccccggcacatctgtcattccgctgtttttgccctggtagttttttatgatttttctctttatctttgacatgaatctctagcctcctagatttgcttttattaatcccacctgagagatggagtctacttttgacttaaaaactcacactgatgctcttcaatcctgggacattcttcagctttgcttctccacctgccctgtcaccctacaccgactccctcctgctgaaagccccatgaggtgaaagcgaggtttccccacttgttttctgtccctgcctgctcctattttttcttttacatgtttgcatctctgtgctccatgcacggtatcctattcaaaagcactaattatctctgttcctgccgtctagtaagcttttcaaatgtcatctcatcgccatgtttgtcatcatcaaattctcgaatttttatgttcatctaaatgttttatatccttggtttttgtgcttcgttattccttatttctagacattactcctttctttgtggatcttaaatacacttatttaaaagctgttgctagagtatttagcacaattcacttcatctggaataaattcatgttcgaaatgttgatttcattgatcgccagccttggcatgagatctcgcatatgttagaattctgtcgagacttacctgggcacaatttctttttgtttttttgttttttgtttttttgatacggaatctcgctcggtcacccaggctgtagtgcagtggcaccatctcagctcactgcaagctccacctcccgggttcacaccattctcctgcctcagcctcctgagtagctgggactacaggcacccgccaccaggcctggctaattttttgtattttgagtagagacagggtttcaccgtgttagccaggatggtctcaatctcctgacctcgtgatccgcccacctcggcctcccgaagtgctgggcacaatttctttctttttctctccctcacgcttacccttccctttcagcaagtttgcagttgcctcagcgctggccacttccctaggtctggctgtggcccggaccagcagagaagcctggtcaacttgtctcttacccaaggaattcttggaacccgctgccctgtgtgagctgcccaccctcagggtcacccttgctcaattccgaaccaagggtgtgggtccctggctgccgtgttttagggacacagcaacgttcagctccatcattatcctctctctctccactgtatctggggttgctgtgggtttgaaacggagaggtccattcacgtgaacccagagtcttcctgatggacggggtgcttggatggagttcaagagggggagtgacttagttatttctgaattttggaaagatcatttgcagggcgaatagacagggaggaagccatccaggggcagggagacgggccagggtccactgcagtagccccgggcagatatgagacaggaaggagggctgggcacagggccgaaacgtgtgtgtaacagggcttgctcagagaggtgcggggctgggaccttgctccgactgccctttgcagggcgtgtactgatttgagggcagccagactcattcagatgctagctgaggccaggacaatggctggccccagagagggctgcagctctgtcctaaggcaggctgtaggccctgggacaggagggagcagacagcgccctgggtcgggagccagaagcccaggttctgtctgaagttagcatgcagctccgtgaccgtacatgtggtttccctctgagcctcagcttcctcgtctgtaaaatgaaccttgtaattcctgccccccgctactgtgcagccgccgtgacgacagggggagaaggaaggggaagcacagtcaaccgtgagactcagtggtgatcagagtggggtgatggccaccgccctgcagtggacactgctacctcacatccctgagagaaggggaagcacagtcagccgtgagactcagtggcgatcagcgtggggtgatggccaccgccctgcagtggacactgccacctcacatccctgagcttccactgcccatcaccttgacacctgtaggtacatacatgtcacgcgttttagagcattgcagatgtgaggagcctgctaggaagcatgtccgtgccgcaacctcacccttactgtgagaaaccccagggcagctgaggcagcctgggaacctcagtctgacagtggccccgcccacccccagcctccgcctctgctccgagttgcttcctgggtccccattctctatgtattgctgtaggtgccattttctgttatggctgaaatcaggaggcatctgaaggatggcagaaaggctggggatgtgaggtcacggcccggctggctcaagctgagttgcagctacaaccttgggcaaggtgctgtgagcctgtggtttgtaaatcctaaaggggacacgatcccacctctgtgtgcttgtgtggggtgaacaggccagccgtgttcagcgtcccgcacgtgcctggtgcggagtggggcgtgggatgtacacggcctgggagccctgggcttaggatcatgagagactttggcttccctgtctgtgacctggaagggcagataagcaagtgtccttagggcagtctcagccacacacaaaaggacaggcccttcaaggaggttctggccttggtcacgggaagggcggaacacagctaagagatgagcgttcattacttacatctatcctgattctgggaaaaggttttgtggggcatttgcacaacacgctgaaacagacggtaaacaaggaagaaaggagacaggacagcaaacctaggaaagtaaggtgaagccatgtcataggccctgacaattattagaggtgggacacagactggcctgtgagctccctagctgccacagcaaagagggatgcagggccaggaacacaatcccacggtccactgacctgctggaatctctgggaagtacaggggcgctgggggggtgaggccagccttgtggccccctgggaaggctggtaatgcggcccctttcacgcccataatgtttatatgcaggaaaagctgggagctgtaagtgggaaaatcagggaaggatgataacccaaagtatcgggcagcctcttcacgactgagcggttcgggtcctgagcagtaggttctgaccccaaacctgacctccactcagcctgaccaaaggcagagatggcgtctccagtggcgaggcttcacggcatagactgcagactctgaggccagaagctagagtgtggctcccacctctgaggatcagtgcctctgggcctcagcgtccccatctgtaccatgggctaacaacagtcccttcctgtggggcctgaaactgacccatgttgagcatggacgggcggcagctaacaccctcctaggtggtcttatctcgttctgctgttccccacatgggccttatggggtctgagagctactgaaatatttctccccatggtgcatgggtcactctgggacactgctgactcgacgtccccttctgctgcagcccctgttgccatttagtgtggctccaagcaacccctgggctggccatcccacatgtgccctgctgagggcaagtgccactttctggggagctgcagcgacagcggagttgcccaaacaccaatcatgtttcttcacaaaaatccacacccctactggctgaccttggctcctcctgtgacgtttctgggggcagctactgctgtccggtttctaggctctaactcagacacttcactgacaggttcaaggtccagcagtctgtgcagcacagctcttcttggtatgcatgtatgtgtgtatgtatgtacatgagatggagtcttgctctgtcacccaggctggagtgcagtggtgcaatcttggctcaccgcaacctccgcctcccaggttcaagcgattctcctgcctcagcctcccaagtagctgggattacagctgtgtggcaccatgcctggctcattttttgtatttttgtagagaccaggtttcaccctattgaccaggctggtcttgaactcctgacctcagatgacccgcccaccttggcctcccaaagtgccaggattacaggtgtgagccactgcgcctggccttggtcctcttttaaaataaactttaataaggatttttatcccaggacatgctgtaattgcaagttctatctatctaagtcatcgcatatgtttacactaattatgtaattagatgtaattatactaattgtataaatgcacaataattgactaagatatattaaatactttgagagaacaaagagaatccacccagaataccttccccaatattaagggtgcagctgaaccccaagagaggacagaagggtcatcatgggagtcttgggctgccagccgagccagggcctcacagtgcacctgcaggtgcagacactgccacagaatggaacggactttcttgagacgattaggcccagggccacagaggagacctggttcacgctgcagcctcacttagcagctccttgacttcactggctttttagacatgtcgaaggacaataatcaagtcattcttctgctcaaagatattccgtggctccccattacctaagaataaagctccactttgtcagcctgcattcaggccctccaggaccaggttcccacgtctgtcttcaccccctactgcagtccgaaagcccagctgactgctctgggtgtgtggaatcctttcccactcgtgtgctattgcctatgcagtgccctccagctggtgagctacccctctgcctcctgttctctgctggatcctggcaactcctctacccctgcagaccatgccccttctctccaaagccttcctcagtccttccaggaggaaacagctctctccctttgccctcatctcctgtagcccttcatttagaattctctcacgacacacgcatttttgaacccgttagagtccttggtagccatctctgtctttacccatggaagtgagttttccaagggcaaggaccatggctgcctgcatcctgatgtccctagcctttggcacggagcctggcagggagcaaactcgaaggcatgttgaacaactaaaggaaaaagtgaagggatgcacaacaggtttcctttggtaatgacagtacattgatggggagaatcgttgggagctgcaggggcccagggggtccagggcggggtgctgcagttggggacatggtggtcagaaaccactcctgggggccaacatgtctcaactcaatcttgtggaatgaagggcacaacagggagggaaaagggaaccgagtctgagcttggtggcttacacttataatcccagcactttcggaggctgaggcaggaggatcacttgaggcttgaggccaggaactcaagaccagcctgggcaacatggagagaccctgtgatatggtttggttgtgtccccatccaaatctcatcttgaattcccacatattatgggagggacctggtgggaggtaattgaatcatggggcgggtctttcctgtgctgttcttgtgatagtgaatgtctcacgagatctgatgggtgtaaaaatgggagtttccctgcacaagctctctctttgcttgctgccatccatgtaagatgtaacttgctccttctttccttctgccatgattgtgaggcttccccagccatctggaactgtgagttctccattaaacctctttcctttgtaaattgtcctgtctcaggtatgtctttatcagcagtgtaaaatggactaatacagtaaattggtaccagtagagtgggatgttgctgaaaagataccccaaaatgtggaagtgactttggaactgggtaataggcagaggttagaacagtttggagggctcagaagaagacagaaaaatatggaaaagttcagaacttactagagatttgttaaatggctttcacaaacatgctgatagtgagatgaacaataaggtcaggctgaggtggtctcagatggagacaaggaacttgttgggaactggagcaaaggtgactcttgttatgttttagcaaagagactggcggcattttgcctctgctctagagacttgtggaactttgaacttgagagagatgatttagggtatctgacagaaaaaacttctaagcagcaaagcatttgagaggtgacttgggtgctgttaaaggcattcagttttaaaaggggaaacagagcataaaagttcagaaaatgtgcagcctgacaatgcgatagaaaagaaaaatcccattttctgaggagaaattcaagctggctgcagaaatttgcataagtaacgaggagttacttatgttaatcaccaagacagtggggaaaatgtctccagggaatgtcagagacctttgcagcagcccctcccattgtaggcctagaggtttaggaggaaaaaatgttttcttaggctgggcccagggtccctctgctgtgtgcagtctagggacttagtgccctgtgtcccagccactccagccatgactaaaaggggccaaggtacccctcagcctgttgcttcagagggtggaagcacaagcctcggcagcttccacatggtgttgagtctgcaggtgcagagaagtcaagaattgaggttttggaacctctgcctagatttcacaagatgtatggaaatgcttggatatacaggcagaagtttgctgcaggggcagagccctcatggagaatctctgctagggcagtgcagaagggaaatgtgcagttggagcccctacacggagtctctactggggcactggctagtggagctatgagaagagggccactgtcctctggacaccagaatgatagatccaccaacagctcgtactgtgcacctggaaaagctgcagacactcaacaccagccggtgaaagcaaccaggagggaggctataccctgcaaagccacagcagcagagctgctcaaggctgtggaagcccagctcttgaatcagcatgacctggatctgagacagggagtcaaaggagataattttggagctttaaggtttaactgccccaccagatttcggacttgcatggggcctgtagcccctttgttttggccaatttctcccatttggaatggctgtatttacccaatgcctgtaccctcattgtatttaggaagtaactaatttgctttgattttacaggctcataggtggaagggacttgccttgtctcggatgagactttggactgtggacttttgaggttaatgttgaaatgagttaagactttgagggactgttgggaaggcatgattggttttgaaatatgaagacatgagatgtggaaggagccaggggtgaaatgatatggtttggctgtgtcctcacccaaatctcatcttgaattcccacatgttgtaggagggacctggtgggaagtaactgaattatggcacgggtctttcccatgctgttctcgtgatagtgaataggtctcacaagatctgatgtgtttaaaaaacgggagcttccctacacaagctctctctttgcctgccgccatgtaagatgtgacttgctcctcatcttccgccatgattgtgaggtttccccagccatgtggaactgtgagttctccattaaacctctttcctttgtaaattgcccagtcttgggtatgtctttatcagcagcatgaaaacggactaatacaccctgtctctacaaaacattaaaaaattagccagtagtggtagtgcacaccttgtagtcccagctacttgggaggctgaggtgggaggatcacttgagcccaggaggttgaggctgcagtgagctatgatggtgccagtgcacaccagcatggctcaaagagtcagactctatctcaaaaaaaaaaaaaaaaaaagacaaaaagaaaggaaaaaagaaaaggaaactgggtgggaagggttgaatggaaaagacccagagtggaggatgtggggctggtgttggcctaggatgccgaggaccaagctgcagtacacctgctgccaccaccagttcagcaaaggacggccctgagtcagctgctgtccccgcgccaccatcagtgcaggggctgcgcatccactatgtatttggatgcttcaatatgagcttatttatctggcctccttcagaggctgtgtgggagaggtggagacataggcaatttctggcaagttctccaggcaccttcaggagacatctgcacctctcgtgccagcctggggcacagctacttctacagtgcccagggtcctgcacacacccaggactggccatggcagagaagaggcaggggccactgcccagaggagcccctttccctcctagactcaggacagaggggcccatagccggggcccctaggatggggtgtagtggccaaaagtccccaccaggtgctgtccaggggctcagcaaacatgaactcgcagaatcctcccagcagccctgtgaggaaggaggccctgccattcccaccttacagatgagcaaacagacgcgagctgctcacggtcacaccactggaaactggcagtgcaggacccatgcagaatggttctagaatttgtgctaacaactgcctcacactgccgttcagccagtgcctccctgagatagaacagttgagacctgggcttgcttggcgaggccccatcctggtcgccgactgcacagggcagctgtgcccacggcttgtcgggaccaccccacagtgaggccatccccgctatacacagcggcctcagatggcacctgcagactgagcagggcctgggccctccggagaggcctgtcctacctcggggttctcctgggtcgggggccggtcttccttcttctttttggtggcctgagctccctgagatggctcctctgtgggcggccgcgactctgccgtgctctcgggctgcgtctgcacttgaggctgaatgatgatgacctggaagatgccatggaggggtgaaggggacagtgatggggagggaggggtgaggggaagagaggaggggtggaggggacagtgatgggttgcggggtgaggggaagagaggaggcgtggaggaggctggagagcgagggtgaggggcacagggaggaagggaagagtgaggggggctggggaggtagctggtatggcacagggcaggggttggggagcacagagcctgggccaggccaacctgggagggcggatccccgggaactgggtggtttgcgcccctgtctgtctagcacctgcccctcctgacacaccttttccaccatggggagggtctgcatgagaagctggcctggtttaggaactgggaaggtctgggttccagtcctgccccaccgcttcccagctgtgtggcctcaggggagtcactgcttctgagagtcaggttggtcatcagtgaaactggccacacctctccccagggaggccgtgcacactcaggcggcgaggacttctcatcccagctcaggtgcagatgaactgaggccacgagagctcagacttgctcctggcctgaggccatccagtcaggaggcagaggagctgggaacccctcaggtcagcctggctccgtttctccctccccacaccacagtgcctgagacacacaaccctggcttgggggcacaggtgggaataacattctattttttttcactgccatgaggcccctcacgtggtggatggggaaggggaagggggtcttcagatgccaccctgcagcagccccccttagccagcctgcctcgaggctcagggggtgatctggtttgatgaaacggtgtgatgctgaaagtcagcctgaaatccacccatccggcccagcctctccctgggccaggatccgctccatctctagctctaccattttatttctttggacaggaaattgggaaagaattattagttttcacggctccaagaagaagaattctccaggatccatcagccacagtctggtttaaactaggaattacttgaacttgggtgtttttttggtttgtttttccctaagcacgggtggtgactgtctgatgaatttgaggcttctgagcacaaagagaaaatatgtcccatttttctgctggcttaagggaagctctgtcttcctctttgtatcacatttttaaaaccccaaaatctctgtatggaagaaatatgtccatttttatatccatgggaagaaaaacattaagatctccaataagaaaaagggcaaagaatattctcaagtcacacatgagaagatagaattcttaagtgtaagaaaaacactgaagcttaacagtaaccaagggaattcaactttcaacaatgaggcatctatgtgcctagtaaatgaacaaaacagtgtttaaatgaccaacatcaaatgctggtgcagttgggtgaaacagacacactccttccagcatctgctaagcaccttgtctggatcaggtgccctcctgggatacacctgccatcccaccatggcccatgacaactcttcagactgcgaattctttgaggggccctcagtgggcgggagagcctggaagcacaggactcccgggaatgcactgggtgcaacagcaccagctcacatgagggtcggccgtcaacatccaggctggggaagcagaaggtaccccagccataagcaagagaggggcggcctggcagaccccaaatggggaacagagagaaagaggccacagacaggggacggcagagatgaggcagccccgaaggcctcaaacagcacaaccaccaggagctcggaggggagcagcgggaggaccttagttttagttttaaaacttggcagaaattatgggagattgtgcacttgggcagtggggtaaaaacagcccttgaccgtccaactccaccagcagaaacagagaatcagtatctcttctagtcactcattcagccacacatgtcattaattggttaatcatttgaatgaattcattcattgaccaatcactccttttccactggtattaattcatgcagccgtattgtctctggatcgcatattcattcatttgttcatgcactaattcactcccttaatcatgtgttcatactccattcattcatttgctcctctgtttccgtcccattcattcatttgtccacttgatcattctgcctcctggtcattcatcctgcctgggcttgttcatttggcccttcccaaatgattgctctcggcctcctgtatgcggccgcacaccctttccggagcctgctggtgggcactcaccttgttgtcagcactgatgaggaggggctggactttgatgctgtcactgaccacagacacggcggtgctgggggccatggcggcggcattgctgggggaggtggagatgatggcgtaggccacccccgcactgctcagcggagaggcgagggcggcgggctcggcgagggcctggggctggctgccgggcgctggcacatggctgacagtgttgttggcggtggggagggctgggctggggttcttgacgctgaccacggtggccttctggaatgttgggggctgcttgggtggccggtcccggcccggggcaacggggaggctgtctggaatcagagtctttggcctaacctgggaagaagggacaggtatgtggtcagacaggcagacacacaggagtgcaggggaggggccgccctggctcggagacttcctatattcaaggggaaggggcagcactggaaagagcacagcgcctgtcacggcctcacagcaggtgagacctcgaccccaatgcctccctcctcctgggcttgcaccgactggccacggggctcaggaggggctgctctggacccacggccctcccagctgcactcagagaaaacggtgaagagcagcggggaggcttggaaggcagcgcttgggcgcgaggggacagtctgtgcagtgtgacgccctgcagatcaagtcccaagcggcaaagccccctttggccttggaagtctggaaagcgctgcccctcggcagggactgggaggggcttcgagggctcctgggccttgcccagttctgcttctcagtctgggtgggggctgctgctgcgctcccgtgaaaaccagagctgagcccgcgtgactgcggcgggcctgacagtgaaggtgtgcagagggcagccgggcagccactgggtggttcaggccagggctctggacagactgttggtttgggcccaatcctggctcctctggggtcctggtgacacacctgaactgggccaggtccctcatctgcatgaggtgatgagacttactggggttcggaagaaagaaaatgcacaggaagtgctgggtgtacttgactgagggctgtcaccagcacccccacacccagcagagtgtttctgatggtggaaattcccatcagagccaccaccactgaccccatgcatggaaccaggagcgccacatgccccagatgaggacacaccaaccctgggaggtccacgccaatattatgccttgagagacaaggggacaaggagaaggggtacgacctgccttctcatctgaaccccgctgcgctcgcactgcagggtggccatcctggcctgttctacagataagcaaactgaggtgcataatggagcctcaccggtaataatgatgctaccgtcgttatcattagggcctgtctggcatcggtgaagggcacagagcgctgtactgccccgcccatctcctcccaccctgtgtccagtggtgcatgtggaaggagtggtccagggtggctcctacagggccctgtggccttgggcaggtcaccaaggcacagcgtgctcttcagttggacagtatcacgtctgtcagctcctcaccagtgcctggcacagagctggcccttgagtctagtgatctctgtgtcccctgccatgctgggtccttagcaaaatgagcccggcctcccacatcagggccctggccacaccacgggcaggcgatgtggccagcctgggttcaggtaagcctgccactctgtccttggcaccagaggtcagggcctttgtcccccaatgccaggcttacagcccaacagaaactccaataccaaaggctttaaaaaatccatcttctcgttcctgccggccctcagctggagaaagttacccgttggaaaactgctgttctccgcctctgaagaggactggcgtgggggcggatggacacccatgtggtggtcagtgaggacctcagctgtggcagtggccgttccgtgttctggtcgatcatctggggtttgcccacatgttcttgttgaccctggccgcccaccctatgtaagcagactctgggcatgggcgagctggcgtcaatcacagatgccagacacagaaactaagctcagctggaagctcaggatctggcctgagccaccccacagagaacaccttcaggggaccttggagcttatcatctttctgcctgtgcctcctggcctgtatgcagccccaggccgggaagcccccgggtccaccctgtccccaccctctctcctttctcagatctgcagtcaccctgccaggctggccccaacacaggctgcctactctgttgcccgtgagccacctgggacagcagcagctggtagctggacccggcatgcactggacaccttctggcccaagctgactgtcctggaggccagcaggccaacggcaggtgcagacttttgtggggcagagacagcaaggacaaaacatggagacagaggtccaggcggaagggagagaggaagaagagagggtgctgggcagagggaaatagcactggccttgattggcagcctctccctggagcctgccttgctctgaagcctcgcatagctccctgctgcccaagggtcaccgacaggagaagtccaactctaaggtccccatgggcccctggtggcctctccacccccaggactgtcccaacctccctccctcagtgctttgactctggtctctccctaccacctctgcctccgtttctcaccctgcaccctcctcctggggggctccctctagggcctaactctacctcagcctgcaatgtcctcttaccctgaggtctagctcaagcactacctcctccaggaagccttccttgatgcccaggtgtgtggcaagtctcctcagggctcccgccccgcagtgtctctttctggcatggcccgatcaccctggactcacagtatctgtttttccttgtctgtcctccctctagaccaagcctgtccaaaccacaggctgcatgcggcccaggatggcttcgaatgcggctcaacacaaattcaaaccttcttaaaacagtacgagagttttttgccatttttttccctttatctcatcagctactgttagtgttagtgtattttatgtgcggcctaagacaattcttcttccagtgtggcccagggaaaccaaaagattggaagattggccacccctgctctagactctgattcagctcaagtgggcacttggggaaagttgccacatgaatgagggagctcagggcggccacctctcaccatccttgagctgggggaatctgtctagccctgaggtcccacgacaggcaggggccatcttggtctttaccactggcagcctctggcccagtatgctatatacagcaagtgctcaacaaagctgagcttgtggtaataagggagctggctaataactacctggcgtttgctctgtaccaggcacggttacaaatgttttgtcttgactcaatactcacagccaccattggctcaaccctcacagccaccaacgaaggaagccggcacctgcaccagtccctctgcaggtgagaagcctcggcccaggaaggctgagaggtcaggtgactggggcaaagcgtggagtccagtcgggggggaccctgcactagaagccagggcacctggcccagagtctgtgctgcccctccctgaaatgaatcccctcgtccagagtgtctcaaacttcctgaccataacccatagtcaaaaatacacacgacggagtcacccagtcttgaaacaagttggtcaagaaacaatgcataggatgcatatcttgatatttccattctattttagtctggcctcatttattccattttaaaaaattctggtcatgacccactaaattgatttcccaattccttgctgaagaaacgtatctggtccaaatgtttccattgaagaatggatagaagaggtaagaggggaaggtgcagctgagagggcacgagttccgcctggcccagtgcccaccagaaacctcagtgctgaggggttaggaacagagactgcggggacagacagacggacaccccagggcccgcccgagggctgcttacctgaggtagcactgccgctccttgcccggccaacctctgcaaggagctgacctgaggacccgtgacaggcactgcagtgatcgttcccaaagcctgaaacatacaggagggcaacgctgagacaggaggagcagctgagaccgaatccgttgcccccagcctggccaagcagggggcagctgccttggagacagcaaattctactcttccctttcttaattatgatttttaaaaaatcacaatagtaatcgatattccttccagaaagtttggaaactagagaaaggaaaagagcagcactgcccagaaatcaattaccctttgttacacattggcttcctcttttaagtgaattttttatacagctaaatatagaatgttgtaacctatttttctactttcacttaaggacaaggtgtgatgtcgctacgatcttcataaatcactcctttaatggctatgggatcttccattcagcagacataatggtatttcctcagacaatcctctactcttggaaatttgagttctagctccatctttttccagttaataaacaatgctgcagcgaacatctttgtggataaatccatttccacatcacagagcatttctgtaggagagtctgaatatggggatccatggaccaaaatgcaggaatattttcaggcccttggtgcatatctgcactgggtccctcaggagggggaacggcctgggtgtgcaccaacctgccccccaaatcccagccccccaatatgggggtctcgccaacacacgatgggatggcagcaccactagcagggtggacattcagggtaaggagaagggagatggcaccctcccaggaattccaggcccacacgcgtacaggagatgtgttgtggggtgctcacttgtctaaagtctccttttgtgggaaccaccactacccacagcccccgatggaaccggaacagttctttttttttttctttttttttttcttgagacggagtcttgctctgtccccaggctggagtgcagtggcgcgatctcggctcattgcaagctccgcctcccgggttcacgccattctcctgcctcagcctcccgagtagctggaactacaggcgctgccaccacgcctggctaattttttgtatttttagtagagacggggtttcaccgtgttagccaggatggtctcaatctcctgacctcatgatccaccccccgcctcggcctcccaaagtgctaggattacaggcatgagccacggaacccagcctttctttttcagatggagactcgctctgttgcccaggttggaatgtagtggcgtgatcttggctcactgcaacctccgcctcctaggttcaagtgattctcccgcctcagcctcccgagtagctgggattacaggcgcccgccaccacgcctgggtaacttttgtatttttagtagagatggggtttcattatgttggccaggctggtctcaaactcctaacctcaggtgatccacccacctcggcctcccaaagtgctgggattataggcatgagccaccgcgcccggtcctgatggagcagttctacatggctacattcgcaccccacgagcctgcctgatggggagagagggaaccccttgctcagatccagtcaaaccatcagtggccagggaccagtgaggttctctcttgatctcagatgcagaaattcttaacagaatgttagcaaatcaattctaacaataacaaaaaggataagacatcatgaacaagctgggtttatcccaggactgcagggctgctttgccatttgaaagtcagtctgtgtaatttgctaaaataacacatggaagaagaaaaaccgtatgccggcctcaacagattttcaaacagctgttaggactaataaatgagtttagccaggttgcaggatagaacaatatataaaaatcagttgtgggctgggcgcggtggctcacgcctgtaatcccagcactttgggagaccaaggcaggcagatcacctgaggtcaggagttcaagaccagcctgaccaacatggagaaaccccatctctactaaaaatacaaaattagccaggcgtgatggcacatgcctctaatcccagctattcaggaggctgaggcaggagaatcgcttgaacctgggaggtggaggttgcagtgagccgagatcacaccactgcactccagcctgggcaacaagagtgaaactccatctcaaaaaaaaagaaaaaaaaaatcagttgtgtttctatacactaggcaccaacatttagaaattcaaaaaattttaaatgccatttgcaatagcatcaataaataaaaataagaaatagggatgaatctgacaatagctatataagacctgtacactggaaacttccaaatatcgccaaaagaattgtttaaagacttaagaaagagatataccgtaaccatgaatcagaagcctcaacattgttaagatttcaatccttcccagattgatctacagattcaacacaacctcaaatcaaaatctcagtcagcttttttttaaaaaaatagaaattgacaagatgattttagaatgcatatgaaattataagggacctagaatagccaaaactatgaaacaaacaaaaataacaaccaaacaaagggaaagatttaacattatctgactccaagacccgctataaagctatggtaatcaagacagtgtagtattggtgttaagatgcataaatagatcaatggaacagaacagagagtccaaagtagacttacacatacatagtccattgattttcagcaaagcccaaaaaggtaattaatttagtacaaaaaagataatgttttcaaaatggtattagaacaaggagatatatactaaaatcgaacagaaaagaacttcagtccataccacataccatatcaaaaaaaaaaaaaaaagaacaaatggatcagagatctgaatgtagggaccaaaactataaaactgctcgaacaaaatgtctcaaataaaatgtaacagaaatctttgggatgttaggtcaggcaaagaatcttagatacaacaccaaaaacataatcgatataagggcaaaataataaattaacttcaacaaaataagaaactcccaaagatggaaagagaatgttaggaaaatgcaaaaagtggccacaccctggaaaaaaacacatacaaatcacctatctgatgaaagccttgtatccataatatatgacagaactcttaaaactcaataatctgaaaacaaacaactcattaaaatgaacacaatatttgaacagatactccactaaagaagatatactgggccaggcacagtgcctcatgcttgaaatcccagcactttgggaggtggaggtaggccaatctcttgaggccaggagttcaaaaccagcctgtgcaatatagtctctagaaaaaaaaaattaaaaattagctgagcatggtagcacatgcctgtagtctcagctgcttgggaggctgaggcaggagggtcactttaggccaggaggttgaggctgcagtgagccatgattgcaccactgcactccagcctgagtgacaaagtgagatccaagaagaagaagaaagatgaagaagaaagaagaaagaggaggaagaagagggagggagggagggaggggagggaagaggggaggaaggaggagaggagggaggggagggaagaggggaggaaggagaacaacaacaaaaacaactactgatggcaaataagcaaataaaaaattactaaacataattagttattagggaaatgcaaattaaaaccacaataagatactgctacaagcctattcagatggctaaaattaaaaagactgaccaaatcaagtgctggtgaggatgtagagcaaatggaactctcaaccactgctgtcgggaacataaaatgatacgctttgaaagacagtttggcagttaaaaagttaaacttatgtatggcaatgaacagaacgtatgtgtcctctcccagatccaaatgttgaaatcctaaccctcaatgtgatggtatttggagatggggcctccgggaggtgatccggtcatgagggtggagccctcagttagtgctcttataagaagagacacgagggagtttgtgtcctctctctctctcattctctttctctctctgccatgggcaaatacagcaagaaggtggccatcagcaaaccaggaatagagccctcatcaggaactgaatctgctggcaccttgatcttggacttcccagcctccagaaccataagaaactgatttctgttgcttaagccagccagtccatggtatttttgttatggcagcctgggcagactaggacatttatgatacgagacagccattctattcctaagcattcgccaagagaagggaaggcacgtgttcatacagagacttgtacgtgaatgttcacagcagctcttggtgtcacagcacaaatgggaagcaacccaaacgctcaccaacaagtacacggatgagcaagctgtggtatcttcacacgacagagtattactcagcaataaaaaggaacaaactactgacacacacaatatggatgaatcacaaaataacactgccaaaaaaacccagactccaaaaaatatccatactgtatgatgctagttatacgaaattctgaaaatggcaaacaaagtgacagaaaataaatcccaggttttgtggagatggtgcagggacgagaggaagggattacaaaacgacaccaggacattttcagggagaaagatgtgttcacgatcttcattgtggcaatgggttcacatttgtcaaacttatattgtacattctaaatacatgcagctcattgtgtatcacttatacctccacaaagctgttaaaaattccctccccatttctctccttatctaatctctctccacccctagaatgaatatcatccatcctcaaatgacatggcagagggtctcaggccccaccacagagctgcttctctcattatgctcggacggcggttcctgcctcctctttgccacctgtcccatgggggtcaaaactctgagaggctcatgtcctctgagccaactgcctgtctctctgcatggaaccaaatgacccacattcccctggatatccactttggacatttgttaaaacagagctttttatgcaatgcggagcccatgacaaacagcctcggccactggatgaggcagctcccaatccataacaccgcctgctgctcttggctggcacagcctggcgggcagcactgagaccacctcaggtgccacctgatgcccgcctcccctaatgcatgtctcaaagatggggggttatggggattgtcctccccattacctcgaactccacgaccagtgttcccccaacttccacaaagcaaggtgtgtggaaggctctgatctccccgcccctggcctgccagccagtgccatttatgcagctggtcaacagtcagggccccaggccagcccagactgtgggggcgggaggcaagcaggagcagccatttgatgagccagattccaggtaactccacccaactggggccgcaggccgagagtaagcaagccctgtggtgggaaggcccacgtggcccggcctgcagtggatttccggggaagtgggttctgtggtgggaaggcccacatgccacgtccctaaggtgtgttccctggcaagcgggttctgtggtgggaaggtccatgaggcatgaccctgcaatggattcccagggaagcacattcagtggcatgaaggcccacacggcatgtgggttcctggggaagcaggttctgtggcgggaaggcccacatggcatgtccccgcggtggattcccgaggcaggttccccgtaagtgtgtgcatgaggggcaggccgtggggccccggggaggagaaatttccacatggatggggctggccagcatatccaataggggccagagaacaggcacgaacctgttttgctggggcttccgtcctcactcagatgccccagataaaacctccaggcatgggccagcccgtgaggaggtgtgggctggccctccaggcaaggcgggtgtgtgctgctgtgttttccaagcccacatgtgcctctgtgagtcctggagggttgctgtgtgaagttgctcctgcagatagctctgggtgggctgaggaggccgaggacagccatgtgtgttttccatgttgcctcgtggaccaagggttgccgtgtgggctgggatggcgatgtgtccatgtccaagtactgccacgtgggccatgggtagctgtgtgttttgtgtgttgctgcatgagctaggggtggccatgtatccgtgtccgggtgttgctgcgtgagccgggggtggccgtgtctgtatccgggtgttgccatgtgggccgggagtgaccgtgtatctgtgtctgggcgttgctcagcagcagctgttgctttctctgatacccactcaggtgtgcacagctctgcttccacacgagttcttctcgggagcgtctttggctctgtgtctgtgtttctgggcctcatatctggtcaaggctcgacgctccctcctgacttgggaccctgacaactcctgtgcccttactttaggaattcacagccggggacagggaaaggaggggagacccaaaggagagggacggatggaggcggcggagaggcagaaccccgagagagaggtgaggagatgacaggaagagctatttccacttgatcctccctagtcagttaccaagaaagggacacaacccgccctggggaaacgtccacacccgcaggaggccggcaacaaacagtgcctggccatgcgtgtccccccaaaactccaaaccaacggcctgtgtgcccctgcctgggactcgaggtgccctgcagctcttcagggagcaaatatggggtgccctcaagtatccagcacccttagctaggcaggcagaaagagtgggctctgcaaccatggacctacagccccagcaccaaaggagagacgattctgagtcaaagtccaaagtccccattatctggggaagagtctgctgcaaacagggctgccttgcagggccccctcctcaccgccctggggacggtgggttccttttcgaacactgccatccccttccaacaaccgtccattctccgccaatgctaagctagcttcaggctctccaatctctacgtgttttcttcactccaagcctacccgagtgcgttcttccacttccctacaaacctttaattagcgagctgaaagccatttttttctggcaagggctgacctttctgctccaagctggaatttattgacaccagcagaaacaatcatctcagactcgatttcaccagcaccaggtagtttacagccgcacttacttcaagatcaatgagcttgtgactacgtttacagctccaagcattttaatagggggtaaaaaacgggccataacagtcaaagataacttcaaattcttcctgccatggctgagtctggggcggggcggggcacagctggggaaatctctaggaagctcagacacggggagacagcgggaaggagacaggtgttggtgcagaccctacaaccttccagggcaaaagccacatgtggctctggaaaaatctgtctttaataaatgtttctgagcgctctagggacttggctctggagctctgccagggcagaggggttccagcgctggctttgacatcagctgtgcgggacccctcagctcttcccacccccgcttcagcacgcaccaccaggactcaccccatacggcaacaccagcctcacgcccgccgtcctcgaactgccaggccacagtctaactccctgactgtcccattggttacaagcaggacctggtccaggacgagccctgtcatttgtgggtctcttctgcctctttccatttagaacagccccacagcaccccttcttcccatgaaaggaacttttttttgagacggagtcttgctctgtctcccaggctgcagtgcaatagcgtgatcttggctcactgcaacctctgcttcccgggttcaagtgattctcctgcctcagcctcccgagtagctgggattacaggcgcccaccaccatgtctggctaatttttatatttttagtagagacagtgtttcaccatgttgactgggctggtctcgaactcccgacctcaaacgatctgcccaccttggcctcccaaagtgctgggattagaggcatgagccaacacacatggcttaaaggaactttttaaagaaaccaggacaattgtctacagaaggcgctgggtttctgtggctgcttcctcgcagtgggccgtgtttcccatggagaccctcactggacaagggtggaccaggctctccagagtcttcacccaccattcaggccctggggctgcagaggccccccacccctcaccgctgaggccccactgccggggctgaggacccacaggcctctggacatttgagcttcaccaggctggggaggcgagaggggaggcagccccaggcctcccagaagcccccatggaaggcggccttgctctcctcctctccacatggcccagccgccacgcgcacagccacagagcacggcaatttaattgcttctcgagttgcaattttccttgcatctttagagaactgctgtgatgtgtggcaaagataacaagtcagttccaacatcaataaccgctaataaatattaatataacataagcaccacttttactgtcatgtgaaaccagttcattattcacagatgaaatccaactgccgcctttatcactgtcaggaacgaacgagctggttccacgggccgctgctgctgcatgagaatgtgcttaggcttggcctttatgtccccatttggtgtcccccaccctcatccagacatcccgccttcatgagccccaagctcatccaggagggaccagcaagggccacggcgagtgcatgtgaaaatccaggcaaattccacttgctctggtctcagctggctgccctgtgcctcctccagcccacgtgcgtttaccaccatgcccggtgcacctgcaacaaagaccaccatggggaggccaacccatgtgcatttgaatttgacttctggactggcgctggtcatgccagactcattgctcccccacctccaaagaaagagggcaagaactgctgtcactgttacaaggaccagaggggaggtccctgtaccaggagatgcccggcacaaaggtgctctaacagcagccggtggcactggcacttgagtcgttccaatggtgccactgcctctcagtcctgcgcgcctctgtgggccaagacacacccacagaaatgcagcatgaggcggcaggcctgagggacccacagagatgcgagggtccaccgggctggagggaggggaggcgacaggtcgaagatgaggtgaggcagcgagcccaggcctgcagttccaggaaggacccctgcagcacctgcaaccaggcaagctgggatccacccactgtcactaggagggaaaagaggaaccagaaagttctcatacaatggaaaacttcccagcagccagagggaagaaaccagacttgcccgggtcaccaagagtgtggaagacacccctcggggtgaacaacacgagcacctgcgtctgcgcacagcctgactccatccgctcaggcaaagccagcactggggcgggtgtggcctgctggtgtcccataaacgcacacagccagggctgggtctatccccaagtcatgactgcggctgcccctgtggaggggagagggagaggaggaagctggaggatgcctattgcctctaccgtgtactagcctttaagaaagtgatcagaagcaaactgcccaacctccctgtttacccatttgggtggagaacatgtggaggcttactatagggccctttgtatattttataataaataaatatgcatgaaggagacagagggagctctgtctacagctggaagcaggagggggtgtctgagtggcaccttgcaagctggaccggaatgttaccagtgggcagtcaggaaagcacataggagtcgggaggcgggacaggagggtggtgggaggggcagaggcaccagcagcaggggtgccaagaggctcagagcactggaggctacagctcccaaaggtggacagtgaaggaggagaggaggggcctgccaccaggggccctgaatccatccatgcccaggagctgaatgtgagtcaggcagagcactctggggcaggcaccagaagggctctcacctcttctgacaggataggttgctggccaagccctgaaagggcagggcgcaagggcggcaccccccaaccccgaggtactgaggcctgtttggacctcggtatcttctcctgccaggaacagctgtccggggcctgcagcccttccccatcctgaatcctgctctctcccagggtgctggtgacagccccgatacccagcagctccggagaggtgagctacgcccaggggactcttagaagacctcaatgctggaaccctcttccaaagccagcttcagcaagccccacaaggagtcattttctttctttcttttcagagaccaggtctcgctctgttgccccaactgcagtgcagtggcgcaaccgtagctcactgcagcctcgaattcctgggctcaagcgagtcacccatctcggcctcccaaagtgctagaattacaggcatgagccaccatgaccacccgaagagtcactttctaaagttctgactccagaatgctgctcatgtctcgctccgaggcaattctgtttactgagagcactgcgggaacaaagatatgcggccgctgtggcccggctgccaggcgcaggcggctcccacccggctcggtctcggtgaccctgaccaaagccaggccggccgaggcaggctgcccagggccacttaaccaatcgcagaggcctttacaggcagctgctcttaatcaaaaagtgccagacaacacaagtggctaccgtatgctgacatttaaaacacccgttcagcggccctcggcgttgcagagcagtttgtttaagttgaaaggatgtaattttatgctatttagcaaaaaaacacacactctgaatggcatcatgaactaaggattgggggttgtgatcttggggggggggtgtcaaaaaatggttgtgaggtcccccgtgaccacaggtgcatgtgtagaggtgtattctggaaacttctgcacggaagtggcagcctctgaggtcacgctagttctgccgtggagggtgtccgtgagaccagctaaaacggccacttctgcatctactcaactggaaaacataccatctggaagagatctggactccaggggcccaggagcccaccaggagcctcctgtgcaatccctcccaccgtgggccctgctctcagagaaggactggcacagccagcagcctgctgggaatgtccaaaatccagggaggggctggacaggagggacatctctaagctgcgtcccccaggaaggaaggaaggcagggcacagggaaagacgcagccttgaggccttggagagggtgggtgaggccgtgtcactcaacagaggacccggggcagaggctggaggcctcgaacctccactgggaagacccggaggttagttttccctctactcatctgtttcctaaagatgcagcaaaatctgttctttaagaggggccatgggcttgctgtaagggctgccaggagagggcagattggggggcgaatgccccaccccagagaggagaggtgctgcctctcttgagcctgaggtaagaggaaaaacacaagtggttggtacttactcgtccctgtgtcacagactgctcacccactatcagagtgtccttattccttcctagccagggggccctgaacccccaacctgggcccttggatctggagtggccgccaccaccaggcacacgtcttccaaacaaatcacagtagcagcaaaatccaatcgatggtagtgcctctagctgcctgtccccactgacctccagacctctgtaaaatagacggtcattgagaagatctaattcccacaaaagatgggttcacacagtcccgctggcctcagcttcatcatccccacctccgacggcctgggatctaactgagggtgcaccacggaacgctgatgacggcctggaatctgagggtgcacctccgcacctgcaccacggaatgccgatgacggcccagcaggtgctcctctctctgcagaggcctcctggagctagccttggtgtgggcagggatgcaagggtgggtggaccccagtcaccccatccccaacccctggccctccagaggaagggcccattttacttccagtgaatggcacagagcttaggccacagctcactggatttgacaaacatctacacccaagtaaccaccgtgcagaccaagatacagaacattccagcaaccctagaggtgcccacaagcccctcaaagggggccccgcattctaacaaggcactcgccaaggagagcaggtcctgtcctcggggacagacttctggttggattggcaaatgctcccgccccgctgtggaaacagcttcaggtctcttctatttctttttttttttttttgagatggagtctcactctgtcacccaggctggagtgcactggcacatctcggcttgctgcaacttctgcctcctgggttcaagcgattctcctgcctcagcctcccaagtagctgggattacaggcatgtgccaccacgcctggctaattttgtatttttggtagagacagggtttctccatgttggtcaggctggtctcgaactcccgccatcaggggatccgtccgcctcggcctccgaaagtgatgggattacaggcgtgagccactgcgctcggcctcttctatttcctgaagccattggcactgactaaactcagcaagtgttcactgcacacctaccccgtgctgggtcccttgtgcacagatgagaggttctgcccgcgatctggggaaacagaccagaagtgagcatcagaacgtgctgcccgcaactcaacggaagtgcacgggaaggtctcggctacatagaaggggtaagcgttaagtggggtgggggagccgtctgaggttggtcacgcacctccatgcctagttcatctccaccattccaggagacgagtatctggagctcttcgtgcagataagagagagagagagagagagacagacagacagacagagagacagagacagagagacagacacatgactgccccaagcaagtgaggaatgaatctgtgtgtaccctgcaccgcgagggaagggttttccgggcacagtaactgaatacaaatgatttacacaaccacagggaaggctctggcagtccccaggagacaggccatggactcgtgaagcgtccttgtctatttactgagatcctgccatgctcagcagtcgctgcatttccacgcagtttgagggacttcctggtgaaaactaacaagaaaatatatggcatgtgtaaccacaagaccagaggggcccttcttgacctctgcttcctctcctctgacgtgggcatggcagcccgtcccctcctggggactgctgacccagtgggtggtcctggtggctgccacaaggcagggggcctttgcacggggctcagagtcccatcggccacttcctcctgactctcaggtgccgctggccctcacctgcacctcacccacctgcttcccctgtcctggagcgtggcggtgaggatgttagaacagcctggtacccagccacccatcaccgcacgcgacctaagacaagacaggcacatagaggagcgatgacatcatcacaacaaacatgaatgagactccttacagacgtccacatccaacagaagggacttccacgagcaggagtttttttcaggccaagaagggacaacatcgtcccaggcagagagggacagtctagaggtataccaggatggcgtggtcaggaacagagccctcccctgccagggcgtcaggtccatctgggaacgggcaggtgtcagcacatggacagaccacacccatcaagctaagctgtctcgactctgcaggtaggcactggggctctaggagtttccaagccaagggtaacatcacgtgggcccataactggagggtgtagggagtcctggagtcccctgagtctggggttagaagaactaaaggtcccctcagccagaagcttctgattcgtccaaagtccccactgcacccacttctgcaaagtgtctgggatggccacatcgcctgtccctgtctggtcctcactctttcctggtctggctgcttaactccagacccaccgaaagctcagcaggccccaccaggccatcctgggaagtgtcccagccctcgctgagaccttccaggagcgtgggaagagaagacatgtggcgctaggctttggagaggaggacagtccctgctctgctccagaagaagttcccagggcctttgatatctctgtggctggttaaacacacacgctcatgcagtatattcactttcatcaagagaaaaaggatcacggcaatcggtccagtggtcacccctgtccccgacacactccctctgacctgcgtctaactggaagcttcaggaacatagcccaaagatctgagagcaaaccccagtcctgccacctaagggttatgagaccctgaacaagttactcaaactccccgagccccagtttccctcctctgtaaacagggagaactaacgttcacacaggtttgccctgacagttaaaacagaagcacatggccgggcgcggtggctcacgcctgtaatcccagcactttgcgaggctgagacgggcggatcacgaggtcaggagatcgagaccatcctggctaacacggtgaaaccctgtctctactaaaaacacaaaaaattagccgggcgtggtggcgggcgcctgtagtcccagctgctcgggaggctgaggcaggagaatggcgtgaacccgggaggtggagcttgcagtgagccgagatcgagccactgcactctagcctgggcgacagagcaagactccgcctcaaaaacaaacaaacaaacaaaaaaaaaacagaagcacatggctcacacctggcaccttggaggccccaagaaactggcaggtctcatgggagagggcaacagggccttctgcagctgtgacttcaagctgtttaacctcctgagcctcagtttcctcatctgtaagatggagatgttgatgccagcttcacagggggagcagagttagcgagactagaaaagtgttcagctcaagaaggggtggctctgccctgtctctgcccgcctcggggaagctccaacctcgcacgaacccactctgggctggggcccagagctgagcctggcgccacgccgtgctgcccaggagacacaccacattctgttctctctgctggggtatttttagaaggaacagcacttctaactgtgcaaataacgtgttgaaaataagctttagattttgacttaaatgtactaggagaggcggaaacattccttgtcctccaaataccgtggagaacatctttttggagggtcctgaagaacccggctgctgtcttcactcctgggatgaatgggccaagccccctcccgggagagctacggaacggggctgtggggtccgccttgtcacctgcatgagccctggagtgctcctccctggccatgtccagtggagacggcacaggggaagctgcaggtcccgcctggttctgaaggcggctccttgtagagaggccgcagcctcaggccgactgtctctctggcccagcagaaatgctggctcctggcctgtggccctcatctctccctgtataccggcagccctgtcgcctcctgtccccagcccctctccttcgagctccagatctgcgtgtgacatcccacctggatgcctcgctgcccactcgagacaggaccgcctcctgccatccgttactggtgagcccttgcaagtggctaacctgagctgagacgggtttcaagtgggaccttgaagactcatgaaaagatattaaagtatctaattaatattttaaaaatgaagtacatgctgaaataatatcttggacatattggattacataaaataattattaaaatgattttcacccccccaggttaatttcacttgtttctttttactttttttattgtggcttaccagaagatttaaacttacacatatggctctcactgcgcttttattagacaatgctgttctacaggaaacttgtaatttaagacaaaagttgtggacatccactttctttcttttttttttttttttcctgagatggagtttcactcttattgcccaggctggagtgcaatggcgcaatttcggcttactgcaacctccacctcccgggattgtcctgcctcagcctcctgagtagctgggattacaggtgcccgccaccacacccagctacttttttgtatttttagtagaggtgaggtttcaccatgttggccaggatggtctcgaactcctgacctcaagtgatccaactgcctcggcctcccaaactgctgggattacaggcatgaaccaccgcacccggctgaacattcgcttctgctgaagaagtggaaggatgagaaaactttaactccatggtaacatcaaaacacacccagacaaaataaaaatcctattcatccccaagagcagtgactacgagaaagccttgaaggaccaagttccagggagaaaggagcctcaaaggctgggcagagacggagacatcacagccaggcggccaccaggtgtgaacacaggtgcacactcagcacaggtgcaggccgctgaggacggagacccaagtgggctgagctgggccatcacggagtagccgggtctctcacaaaccactgcaggagtgggaggcagtgcgaacacttcaaaaaatagttgggtcatttcttacaaaactaaacacacacctgtgctctctgacccagcaatttcactcctaggtgtttacacaagagaaatgaaaacctgtatccccaaaacatcatgtgcatgaaaattcggagcagctttattcataatctcttaaaagggaaaacaactcaaatgtccatcaactggtgagtgggcaaacctactgtgggacccccacgccacgggatgccactgagaaacacgcagggaaagaatgacgaatactctcgatgacacggaggagcctcatagcactgcgtggaacgaagggagcccacacaaaggccgcaggcctccccggacatgaggctcaagaagcagcaaaactaatccctggtgatgaaatctcaacagcgggtgctctgcgggacgcatcgcgcaggtgcagaattttctgaggtgatgcaaatgctctattttggagtataagttacctgggtgtacacaactgtcaaaactcatccagcagtacaatcaaaatctgtgaatttcaatgtatgcaaattttatctcaaattttaaaaatctatgtattttatttttgagacagagtctcgctgtgtcacccaggatggagtgtagtacctcgatctcggctcactgcaacctccacctcccaggttcaagccattctcatgcctcagtctcccgagtagctgggattacagatgcctgccaccatgcctggttttttgtttttttgagacagagtctcactctcttgcccaggctggagtgcagtggcgcggacttggctcactgcaacctctgcctcccaggttcaagccattctcatgcctcagcctccagagtagctgggattacaggcacctgccatcatgcatggttgatttttgtatttttagtagagacagggtttctccatgttggccaggctggtatcaactcctgatctcaagtggtccgcctgccttggcctcccaaagtgctgggactacaggcgtgagccactgcgcccaaaaaatctatatattttaagaaggacaagagctgcagctccaaccctcatagaaaggcagggccaagggggcagctagaggagcccagctggtgcacagacctatgccctctcaggggcagcactgatagaccctcattatggcagctgcatggctaagatgcttcatctggaatggaatcaatattcatagttatgtcaatgagggcctgaaaaataaggtgccatctctaggaggagacccaggaccaggatcaggaacaggttctgggtggcactgaatatggggcaggaaatctggatgcgccattatggaaataaatgcactctggcctcactgatgaccaggaaggcactaaggaaggactcgtgtctcgcttctctgctatgcattgatagcacctggacctgcagaaaagcaggagctggttgaggactgaaaaagaccaaggacttcacaaaacctccaccaggctgctgggctgcacacacacggcgcctccagtgcgtgagctcagagccggcaccgaccatctgcagcagctgcacaagcgcaggcccttcctgccttctgccaagaccccttaggagcctccagtagaaaactcaagatcggctcagacagggctggggaagagggagactcccgctgagccaaaagcaggctgctgtgatgagccagggactgcgggaagctgcacgacccatagaggcaggagacgctccttcacccacggctggggagactctgaagctccagggtgcagttaggtaagtggagaaggagagagggctgtgggtagaacacgtctgagctctgccccaggactgccatgtgtgactggtgtccccacctgaggccttacctgtcaccttgcaaagttgccgcgaagtttcaatgaaatgcaggaagcactgcgcactgagcaaatgccaaggttctcccactggacctcccacgagcttcccaggtgggggcggcagagggggctcaacgcatctgtgagcacagtggggaccaggaaagggtgaaggagatgctggcgctgtcttggaagttaagtagggttcccagacatggggcggaggtaactgtgggacacccagcccgtcctgtcccagcatcaacgaggagaccaggagaagtcacggccacaggggatgggtgggagcagggctagggaggggcgaagggatagggccgaaggcagcaaaggccacctgcaggagggtgggtctgaggaagagggagacgggtagagatgggagcccagcagtccaggagctgcccagtaatccaagatgaataagaggctgcccacggaggcagggagaccaggaggaggttgcagaggcccagggaggtgaggatgagtaagacatggttgggctctgggctttaagcaggaagagtgatgtatctatcaaaaactcaaaaagcccagagttaggtggtggggacaacaataaagtccccatcctcaaaatacagccaggggccagtggggtggggactcaggcaagccactgccaccctgggcctcagtttccccttctgtaaaaagcaatctgaaagcaatctgtgaaatgcagaagtgcttaagatgccgcacctccaccagggcaggtgccacgggcttagatcaccagtttttccgcacctcctcttggcaagagggcctgaacctgcctccgggcaagcctgtccacaccctccagccaccttaattattcccacattcctaacaggaaatctggcccttaaattcaccagcaagcctgcacccagcgccaatgccacgtccctaattaccagcattagcattgctaatctcccgccagccccatcacaggcaccccttgtccatgcagtcctcctgttaataagccggaataatgaggcttcaccgcgcagcgggggccaacaggatgcaggaggattttaatttcagattttggggtcccaagttatgagggacaactgaaagggatcaggaatgatcccaggggctgaaggaggccgcctgagaggctgcctaaatggcccccagagaaacagtgctgggtggggaaggatggggagaggataagagaacactgctctcagactttggtggacaaataaaaataactgggagggagggacttctgtgaagcacctgcttccccacctagaaggcgaaggggccgaaggaagaggcagactaaccccaacagctgggaccttccagagccccggtcagctggacaaggctcagggactagaggcaaactcttggcccatgtgggcaggagtgggtgagatggatacaggggaagggtgccaacacccccttcttcatgtgaaggcatccaaagcttggggtggggctgtggaggtgagtggggggctgtcgtttcatggaatgtaattttaatttccattaatcaacttctaaacattacaactcattgcaatttttaaaggctcaacaaatgtttgctgcatgagcagcgggattcgtgaacagtaacaacccacatccacagcaccccgcagcgccatgcagtcctgatgtcatggactcaggaatgctgcgcgtgctcacaatgaccattcccttaaacctgaggaaatggaggatcagaggttgagtgacctgcccaagaccacccagctaccagtcagccaacacccagaggaagattcccagtcagcaacacccagagggagattccagagacctccagaggtccacgcagtgctacctcctgcaagctacaccgcgccatgccgcaccaccagctctcagcggggacttcgggggctgtgcccttccagggctgtttgccccggagtggatcaggccagtccgtccctctgtgactcggcctctcaatcctacacctcaggaggaagctcagtctcctcctcctcccccgaggccacttcagctctggttttaatctccactgcttagagtaacagcggcggaggaggtgggtcacaaagacctgaaaatcacagatcccaacccagctggatcgctttgttcctctgacgttgtggtgggcacaatgcaaaattgtgagacgccaccaaccccacttcccacgttagcagggggatggggcaggggtggacggagtccaccgtcactttaagcctctgcctcgatgtgggctcgggagcacccactagatgctgggcagggggatacggcggcagggccttcattctggtcaggaaacagacctgctcatggtgaccagccaaggtgaggacggcaggggcacaggctgggggggccacctgccattgattcattcactaacgcagcacccaccccaggtacaggggacacagcactgagtcagaagcagccccgtctcccagggactgcctgttcagtgggcacagacccatcccccaccccatctgtgagaccacagagatgccacttcccagaggagatgacaatgagtaggaccctgaaagaaaagtccacgacatggcccgaggcccagtggggggaatgcggccctggggactcagaacagcctgacatggcacagcaagtctggggccagaagagcctgggatgccaggctcagcatctgcccttgtcccagcaccaccaaagggtccgccttctcccttttcccagccagactcgggacaggagcagaaaatccagagcctgcaacatctcatacttggtgtgggggcctgggacacagatccaggccaccgggacagtgtgtgccaggcaccatctggagggcagccgatgggctctgccagattcctgatccacagtaggaccctgggggcaccctctgcccgaggaccctggaacacacagctcggggacaagagaataactgcagggatctcgccaattcctgactaaccccaccctaggtcagtcccagacttcatccccccagctctgtggaaaggtactattaccatcccactgaacacacagggaaacgtgacctgccaatgctgggaggtggaggaagccagtccagcccaggcagctgactgcagagcccatgtgtgctccaggctgccctaggagcagctgccccacacagggcaccgaggtctgtggccctgaggacacagccaaggcacacggtcagaggagggtgcccacagctcacccacagcctggcccctgagctgaggcccagcgcacgagctgtcggggagccacgtggagggcaggaccacccaggcttccctgggagtggcagtcctaggaggacacccgggacgggggtgcaggagttggttcagcagcaaacccttgccccagctggacctgagtttccccatctttatgatggggtggggctggagtggctgattcctgggggccagggtgaagcgtgtgactcagtgaagaaagggggattcagagcttaggacacaggcctgaggcagggacccacaggcggacccccagcagggagggacccccccccccccatcctcagaagggctgaccaaagccaagagcacacaaagtagatggaagatccggattgaatcctgctcagcaccgcctctgccccccaagccagcccctcctgcccatgatgccctccacgctgctccccaacatgctccggggttgcctgcctgtggccttcgtgccagcacccgctcccccaagcctggagaaaagagctgcctgtagtccctgagcccgtccccaggagcacacagtccctgtgcctgtcccccagtagcacagccaggggctcggggacacagaagcacagggggttgattacacccgaagggccgtaatccctaggacagagctggcccggggaggccagaaaaacccaagcccctattttgttttgagcagagccccatctgagctagatcccagggaagtaccagggaatgtttgggaacgatgagcatgtggggctctgggaaaggccccactagtgctgggggcggcccgatctccagcaggctcagctacatctccgtctcctcgtggggacacgggcagctgcacgcttcctccaggccccgcgggctctagagtcctggcagctggctcacaccgggatacttgactgctgtgccccactcccaccccctttgtaaagcaaacaggtttagatttcgacggacaggtttggggtccacattcagtggccgggcacatgacagcgactcctgggccgtgtgacactcaccctcagctctcaccttagtctctaccagttttggtccaagaagtggcagcagcccaagcatccagcccagcggcaccctggcaccatgctcgtggggcaccgggaaaagccacctgcagcattccaggcccggcttccgagttcctcctagcaactgggtctcatgcagatgaaaacccccaggcctggcgcacagtagctgctcagtcaaatgtcttcagccctttggactcaacagtacacttggaccctgagggaaggaacagcgctgggcctggggtccgaaaacctggcttcaacccagctccctcctctaccctcctgctgctccaccttcggtaagatgctgagccccgcaagcctcagtttctccatctgtaaaggctgcagctgttctgcagacagtgaaggactgtgcgcccagcatccagtggcttccacctatggcgtgtgttgtcaggctatgagaaccctgatggcaaaggtgccctgagcagaagctgaaaaccacgtcctttcaagggaattcggggaggaaataaggttcctttccacgtgcatcttatttctggggcctcaaggtgccaggagccaccgcccaggagctggacgcctgtgctgggaggggcactatggcatgctcacctctgatgtctgtttccatccattcctcctctctggtcatctgaagcaccctctggattctgggagctatcgagacttaatgagggccacctggaggccctgcatcaataacaagtttgtattattgcctcggtatttggacaaattaggaaccccacagccggcgtcagcagagtttgggaatttcctaagatgccaggccaagtccactcctgagcctgcccaccagcaaatgacgcatcacagggccacgctggcccatcctggttcctctatctgctagatgtggatggtggggtcctggccttcgaacgggaatgtctgattcgagaacatccccagagccaggaagaaacaagctgaccgagctcctgatgagtgagtgaatgggtgaatggaggaagaaaccctttgcccagcccatcgcatgggttcagaagctctaatgaagtcaggggcctggaaggaaggacttggggaaggaaagcatccgactgcacagtcaggcaagagctgggcctcgacggtcactcctgccttcctgccgcagtcctgagccttcgtttcctcctctgtgaattagagcgatccttacctcttaggagcacatgagattcctgcataccgggctgcgcctgcacctcaaaggtgcttgcgacggctcactcactccttgcctgtttcccgtattaatttcctgcctctaaatcactggtgaaaacgaggtttgcttctcaggttaccatggcaggaaaaccctccaagtacacaaaaagctgcagaaatcctgggtttcctgaagacctggctcaggtgtgactgtgttaccatctcctccgtgttgggaggcccatgggcacctagctttccccagtgggaacggacaggctcgctctgggtaggagcagcaggggtctgacccaggctcccccagcgccctgtgaatggggcgatttaactccgtctgagtgacatgaagcatgggaggcacttgtctgtgcttcccaagcagccgcccctagaaatctgagaccctcccatccttgggtgggaattgagagtacatggggttttgtgctttctgcagaatcacctgcgcttgagtgcacggggcctgtttcccagcacagtgcccacacagctggggcttgtttccctggctccagccccagccccaaatccccacactgctcagatcccctgcacctgggctgcagggcaatgagtgcctccagaagggcctgatcgtggggacagggagtgatagggaaccccaggaacgccatcttccagcacctgaccagtctcctcccaaatactgttggcagaattggggggggggtggtataaagcagtcctgcttaccttgaccttggcaggaagctgtgggtaagcacgaggggtcagcctgaacctgagtctggggctccaaagggggctgagtgcctcccagatggtaccagaactctttgggcctcaggccccaggcagtgagatggggaagatgctaccatcccctcctgaggatgacctcagggccacccgtgctgttccttctgcctgggtcgctctgtcccctgcctcttgcccaagtcacccacttactccccaaataattaccaagttcctacagtgtgccaagcacccagaactaactacacacaggtggacaccgccctggcctccaccggctcatcagggagagtcaggccctgcgggagggaagcatgggggctgggaggcctgctggagccagagtggtcacggaaggcttcccagaggaggtgcactgcggcagagcccaggctgagagtggagggggcaccacgtacttctggggctcggggtggggagggatgccagagactagagaggctccctatctctgagaagcttcccctgacacccccaaacgaggccagataccccaattctgccctctaccagcaccttctatgccctcccgacatgcctacaatctcgatccctcctgctgggctctcatctctcagagcgtagggagtaggtcatgtctcgaagagtgctggcgtcctgggcgctcagtgtacacgtactgagtgggatgggaaagaggaaacacggaaagtcctgttattatggatggatgaaagggtggacggatggtgggtggacggatggaagggtagatggacagtgggtggacatacggaagggtggatggacgggtagatggatggacagtggttgtatggatggatgggtggatggatggatgggtggatggacggtgcgtgggtagaatcaattccaccttcctgcagaagactctcctgcctcatgttccatctcagggggatgctcaggattccaggggctgaaaatattccaggttgcaggggctgcacaccacactccccaccccagcccaaggccatgaacatggcagggaagacagaagcctgtggctggggaacctttggtgacactgtggaggcccctgctagctcagccacctgccacagaaggatggagggtagcagggcctctggtgactctgcaggacctggaaacggggcacaggatagaggctggccaagcagatgctccgtttaagggggctgcggccaattggcatcactgaagcccaatgacaatgccaccaggaggtcctgttattcatcccctgttaaacgtgagaaaaccaaggcacactggagttaagcaagtggtccaagatcacgcactgcgtgggtggcagagcccttccccatgagaagcctggccttgcaggctgagctgtcccagtccccaggcaagatccccgcccccacccttggccctgctattctcagtgcttctggaagggctgcctccagtctgtgtgttgccattctgagcacctactcggcaccaagcattctgttcacgttcatgatctcatttaaaatgatctcgcaaggcagggctctgctgcctttgtttttaagcagaccgacgcatgggcaggtgactgacagccatggatgctaacttaggaagtgcccgctgggccttaaatcctggccagcgccagggcccagccccctgccctatagaacctctcagccacgcagctcccatgaatggcctggcagagggaagggctctgggccctccaggtgtgctgggtgcatctcctgggacaggctgggcccagagcactcaccgcagccccgctcggcagcacaggcaccaaattctgcctctctgtcatgtcacaccttccacgcggaccctgtggggaccagagtgtgaattctgctttcgtacctgctcttgccactgccatccatgaaaggcctgaggataggggtcaggtggagtctgggtctccaagcacagggctgatgaccagggtgtggccctggctcccggaagctcagatatgtttcagtttgtcacttcggctctgcttggtgtgcttccttttcttttttacttatccagatacgacttacaaacagcgatgtgcgcaggtcttaagggtacagctggaggaactcctcctgcatccacacccagacaatgaccgctgagttcaggatccagagcacagggcgccagagcctcctccccgctgttgtccctcctccccgctgttgtccctcctccccactgctgtcccgttcggacgtgatgctgcctgttttgtaccttacatcagtggtctccaacctttttggcacagagaccagctccgtggaagatggtttttccacggacctgggagggagatggttttgggatgattcaagcacattacatttattgtgtagtttatttctgttattattacattgtaatagataatgaaataattacacgactcaccataacatagcataagtgggaaatctgagcttgttttcctgcaactagacagtcccatctgcgggtgggtgatggggacagtgacaccctaaatgtgttgcttatgtccagtctactccatcatctcgttttggttgctgtcactgcagaaaactctgcttcaggctgggcgcagtggctcatgcctgtaatcccggcactctgggaggccgaggcgggcagatcatctgatgtcgggagtttgagactagcctagccaacacggcaaaatccatctctactaaaaataaaataaaaaaaaacatttagctaggtgtggtggtgcagaactgtagtcccagatacttgggaggctgaggcacaagaatcgctcgaacccgggaggcagaggtggcagtgagccgagactgtgccactgcactccagcatgggtgacagagtgagactctgtctggaaaaaaaaaaaaaaaagagagacagagaaaacccggcttcacaaagacaggatgctggacatggaagcaggcttttcagtgctcacgtggcaatctcaggatattccactttgacttttatccagaacatatggagatttgaagttgtctcaaacacacttttagggccactgtcatttgcagtctcaagcagttgatcctcttctagcacagacaaaggtgattcgcgtggcttatccacaaatgggtcacagatccattccttcccagtttggggttctttggtggttgggaagtaacgctcaagctcttttgaaagctgaggtaggggccgggcgcggtggctcacgcctgtaatcccagcactttgggaggtggaggcagcagatcacctgaggtcaggagttcagtaccagcctgaccaacatggagaaaccccgtctctactaaaaatacaaaattagttgggtgtagtggcgcatgcctgtaatcccagatacttgggaggctgaggcaggagaactgcttgaacctgggaggcggaggttgcggtgagccaagatcgtgccattgcacttcagcctgggtaacaagagcgaaactccatctcaaaaaaaagaaaaaaaaaaaaaaagaaaaaagagagctgaggtaggtgatcatgcaccagctggaagagggaaggccctggctctatctctttcaaaatctctgctaatgtttgaaacatgtcaaaaatcccagtgttccctcgtcacccccataattccaatttggctttgaatgcagccactttatctgccgacttgaacacagttgtcattcttccctgaagtgacagattgagtttgttgagcaggttgaatacgtcgcacaagtcagcaagttttgcgactcatcctatgtcactgaaatatgctgctagtggggactatttttctaaaagaaatctctggagcagctctcataactcagaaactctggccagtgatctacctttggaaagcatctcacttctgtgtatcagagaagacgtgtgtgtaccgcgtccatctcctcacagagccgcgagaacagacctcgtgagttaaaggcatgcactttgctgtggctgatc

SEQ ID NO: 1586 - DNA, 1086 bp, Homo sapiens
  Genbank Accession No. Z97171
agcatagtgcctggcacagtgcaggttctcaatgagtttgcagagtgaatggaaatataaactagaaatatatccttgttgaaatcagcacaccagtagtcctggtgtaagtgtgtgtacgtgtgtgtgtgtgtgtgtgtgtgtgtgtaaaaccaggtggagatataggaactattattggggtatgggtgcataaattgggatgttctttttaaaaagaaactccaaacagacttctggaaggttattttctaagaatcttgctggcagcgtgaaggcaacccccctgtgcacagccccacccagcctcacgtggccacctctgtcttcccccatgaagggctggctccccagtatatataaacctctctggagctcgggcatgagccaccaaggccacccatccaggcacctctcagcacagcagagctttccagaggaagcctcaccaagcctctgcaatgaggttcttctgtgcacgttgctgcagctttgggcctgagatgccagctgtccagctgctgcttctggcctgcctggtgtgggatgtgggggccaggacagctcagctcaggaaggccaatgaccagagtggccgatgccagtataccttcagtgtggccagtcccaatgaatccagctgcccagagcagagccaggccatgtcagtcatccataacttacagagagacagcagcacccaacgcttagacctggaggccaccaaagctcgactcagctccctggagagcctcctccaccaattgaccttggaccaggctgccaggccccaggagacccaggaggggctgcagagggagctgggcaccctgaggcgggagcgggaccagctggaaacccaaaccagagagttggagactgcctacagcaacctcctccgagacaagtcagttctggaggaagagaagaagcgactaaggcaagaaaatgagaatctggccaggaggttggaaagcagcagccaggaggtagcaaggctgagaaggggccagtgtccccagacccgagacactgctcgggctgtgccaccaggctccagagaaggtaagaatgcagagtgggggg

SEQ ID NO: 1587 - DNA, 2831 bp, Homo sapiens
  Genbank Accession No. Z98265
gaattccggacaggacgtgaagatagttgggtttggaggcggccgccaggcccaggcccggtggacctgccgccatgcaggacggtaacttcctgctgtcggccctgcagcctgaggccggcgtgtgctccctggcgctgccctctgacctgcagctggaccgccggggcgccgaggggccggaggccgagcggctgcgggcagcccgcgtccaggagcaggtccgcgcccgcctcttgcagctgggacagcagccgcggcacaacggggccgctgagcccgagcctgaggccgagactgccagaggcacatccagggggcagtaccacaccctgcaggctggcttcagctctcgctctcagggcctgagtggggacaagacctcgggcttccggcccatcgccaagccggcctacagcccagcctcctggtcctcccgctccgccgtggatctgagctgcagtcggaggctgagttcagcccacaatgggggcagcgcctttggggccgctgggtacgggggtgcccagcccacccctcccatgcccaccaggcccgtgtccttccatgagcgcggtggggttgggagccgggccgactatgacacactctccctgcgctcgctgcggctggggcccgggggcctggacgaccgctacagcctggtgtctgagcagctggagcccgcggccacctccacctacagggcctttgcgtacgagcgccaggccagctccagctccagccgggcaggggggctggactggcccgaggccactgaggtttccccgagccggaccatccgtgcccctgccgtgcggaccctgcagcgattccagagcagccaccggagccgcggggtaggcggggcagtgccgggggccgtcctggagccagtggctcgagcgccatctgtgcgcagcctcagcctcagcctggctgactcgggccacctgccggacgtgcatgggttcaacagctacggtagccaccgaaccctgcagagactcagcagcggttttgatgacattgacctgccctcagcagtcaagtacctcatggcttcagaccccaacctgcaggtgctgggagcggcctacatccagcacaagtgctacagcgatgcagccgccaagaagcaggcccgcagccttcaggccgtgcctaggctggtgaagctcttcaaccacgccaaccaggaagtgcagcgccatgccacaggtgccatgcgcaacctcatctacgacaacgctgacaacaagctggccctggtggaggagaacgggatcttcgagctgctgcggacactgcgggagcaggatgatgagcttcgcaaaaatgtcacagggatcctgtggaacctttcatccagcgaccacctgaaggaccgcctggccagagacacgctggagcagctcacggacctggtgttgagccccctgtcgggggctgggggtccccccctcatccagcagaacgcctcggaggcggagatcttctacaacgccaccggcttcctcaggaacctcagctcagcctctcaggccactcgccagaagatgcgggagtgccacgggctggtggacgccctggtcacctctatcaaccacgccctggacgcgggcaaatgcgaggacaagagcgtggagaacgcggtgtgcgtcctgcggaacctgtcctaccgcctctacgacgagatgccgccgtccgcgctgcagcggctggagggtcgcggccgcagggacctggcgggggcgccgccgggagaggtcgtgggctgcttcacgccgcagagccggcggctgcgcgagctgcccctcgccgccgatgcgctcaccttcgcggaggtgtccaaggaccccaagggcctcgagtggctgtggagcccccagatcgtggggctgtacaaccggctgctgcagcgctgcgagctcaaccggcacacgacggaggcggccgccggggcgctgcagaacatcacggcaggcgaccgcaggtgggcgggggtgctgagccgcctggccctggagcaggagcgtattctgaaccccctgctagaccgtgtcaggaccgccgaccaccaccagctgcgctcactgactggcctcatccgaaacctgtctcggaacgctaggaacaaggacgagatgtccacgaaggtggtgagccacctgatcgagaagctgccaggcagcgtgggtgagaagtcgcccccagccgaggtgctggtcaacatcatagctgtgctcaacaacctggtggtggccagccccatcgctgcccgagacctgctgtattttgacggactccgaaagctcatcttcatcaagaagaagcgggacagccccgacagtgagaagtcctcccgggcagcatccagcctcctggccaacctgtggcagtacaacaagctccaccgtgactttcgggcgaagggctatcggaaggaggacttcctgggcccataggtgaagccttctggaggagaaggtgacgtggcccagcgtccaagggacagactcagctccaggctgcttggcagcccagcctggaggagaaggctaatgacggaggggcccctcgctggggcccctgtgtgcatctttgagggtcctgggccaccaggaggggcagggtcttatagctggggacttggcttccgcagggcagggggtggggcagggctcaaggctgctctggtgtatggggtggtgacccagtcacattggcagaggtgggggttggctgtggcctggcagtatcttgggatagccagcactgggaataaagatggccatgaacagtcacaaaaaaaaaaaaaaaaggaattc

SEQ ID NO: 1588 - DNA, 669 bp, Homo sapiens
  Genbank Accession No. Z99410
ggacgatgtccccgagcggggtctcatcagtgacgcccagtccctctacgtggagctgctgtcagagacacctgccaatcccctgctgttaagccttcgatttgaagcctttgaggaggatcgctgcttcgcccccttcctggcacatggaaatgtcactaccacggaccctgagtatcgcccaggggcactggcaaccttctcgtgcctcccaggatatgccctggagccccctgggccccccaatgccatcgaatgtgtggatcccacagaaccccactggaacgacacagagccggcctgcaaagccatgtgtggaggggagctgtcggaaccagctggcgtggtcctctctcccgactggccccagagctatagcccgggccaagactgcgtgtggggcgtgcacgtccaggaagagaagcgcatcttgctccaagttgagatattgaatgtgcgggaaggggacatgctgacgctgttcgacggggacggtcccagcgcccgagtcttggcccagctgcggggacctcagccgcgccgccgccttctctcctctgggcccgacctcacactgcagtttcaggcaccgcccgggcccccaaatccaggcctgggccagggcttcgtattgcacttcaaagaggtcccgaggaacgacacgtgccc
